(19) United States
(12) Patent Application Publication
(10) Pub. No.: US 2026/0207775 A1
(43) Pub. Date: Jul. 23, 2026

(54) ANTISENSE OLIGONUCLEOTIDES FOR THE TREATMENT OF CARDIOVASCULAR DISEASE

(71) Applicant: ProQR Therapeutics II B.V., Leiden (NL)

(72) Inventors: Marko POTMAN, Leiden (NL); Aliye Seda YILMAZ-ELIS, Leiden (NL); Bart KLEIN, Leiden (NL); Petra Geziena DE BRUIJN, Leiden (NL); Bruno Filipe Madeira DE ALBUQUERQUE, Leiden (NL); Angela HELFRICHT, Leiden (NL); Peter Christian DE VISSER, Leiden (NL)

(73) Assignee: ProQR Therapeutics II B.V., Leiden (NL)

(21) Appl. No.: 19/137,225

(22) PCT Filed: Dec. 8, 2023
(86) PCT No.: PCT/EP2023/084865

§ 371 Date: Jun. 9, 2025

(30) Foreign Application Priority Data
Dec. 9, 2022 (GB) 2218585.4
May 8, 2023 (GB) 2306756.4

(51) Int. Cl. A61K 48/00; A61P 7/00; C12N 9/10; C12N 9/78; C12N 15/11; C12N 15/86; C12N 15/88; C12Q 1/6869; C12Q 1/6883

(52) U.S. Cl. CPC A61K 48/005; A61P 7/00; C12N 9/1051; C12N 9/78; C12N 15/111; C12N 15/86; C12N 15/88; C12Q 1/6869; C12Q 1/6883; C12N 2310/20; C12N 2310/322; C12N 2750/14143; C12Q 2600/106; C12Y 204/01274; C12Y 305/04004

(57) ABSTRACT

The invention relates to the field of diseases caused by high levels of LDL-C and/or fibrinogen, such as cardiovascular disease. The invention involves oligonucleotides for RNA editing technology in deaminating target adenosine nucleotides, such as the adenosine at position 1055, in transcripts of the human B4GALT1 gene.

### TECHNICAL FIELD

[0001] This invention relates to the field of medicine and in particular cardiovascular disease (CVD). The invention involves the use of RNA editing technology in targeting the transcript encoding the enzyme β-1,4-galactosyl transferase 1 (B4GALT1) to bring about amino acid changes that reduce B4GALT1 function.

### BACKGROUND

[0002] CVD is one of the leading causes of death and disability worldwide. The provision of therapies for CVD therefore represents a significant unmet medical need. A variety of risk factors exists for the development of CVD. These risk factors include elevated blood levels of low-density lipoprotein cholesterol (LDL-C) and/or elevated levels of fibrinogen (Montasser et al. 2021. Science 374:1221-1227). Increased LDL-C concentration rises the likelihood of arterial plaque formation. Atherosclerosis and fibrinogen increase the risk of blood clotting and thrombosis. LDL-C is an established risk factor for coronary artery disease (CAD). The identification of mechanisms by which to reduce the blood levels of LDL-C and/or fibrinogen would therefore provide potential targets by which to prevent, ameliorate, or treat CVD.

[0003] A recently identified target in the fight against CVD is the enzyme B4GALT1, that is involved in the processing of biologically important biomolecules, including those that are involved in lipid metabolism and coagulation. B4GALT1 is ubiquitously expressed and plays a critical role in the processing of N-linked oligosaccharide moieties in glycoproteins, transferring the galactose from uridine diphosphate galactose (UDP-Gal) to specific glycoprotein substrates. B4GALT1 is therefore important for biological activity associated with correctly constructed oligosaccharides.

[0004] Recent research identified an association between a B4GALT1 mutation that exists within the Old Order Amish population and a reduction in CVD in that population (Montasser et al. 2021, supra). Importantly, B4GALT1 gene-based analysis in nearly 600,000 subjects revealed an association with decreased CAD. This population was found to have an enriched missense variant, referred to as p.Asn352Ser (asparagine to serine; also herein referred to as p.N352S, or simply as N352S) in the B4GALT1 protein, and decreased blood concentrations of LDL-C and fibrinogen were associated with this variant. The effect of this alteration was systematically analysed through a variety of techniques. Knock-in mouse studies provided evidence that the N352S variation has a causative role in decreased LDL-C and fibrinogen levels in blood. N-linked glycan profiling of serum from human subjects with this mutation was associated with decreased galactosylation and sialylation of apolipoprotein B100, fibrinogen, immunoglobulin G, and transferrin. Enzymatic assays revealed that this mutation results in a 50% lower galactosyltransferase activity compared with the non-mutated protein. Structural studies showed position 352 of B4GALT1 is in a functional domain of B4GALT1 and mutation from asparagine to serine was understood to hinder the conformational change required for enzymatic activity, affecting the glycosylation efficiency of B4GALT1.

[0005] The B4GALT1 N352S mutation was therefore observed to affect at least two separate risk factors associated with CVD, namely reduction of blood LDL-C and fibrinogen concentrations, and therefore may be one of the first targets to have pleiotropic ability to protect against CVD. Importantly, the B4GALT1 N352S missense variant was not seen to be associated with any severe phenotype.

[0006] Targeted modulation of galactosylation has been identified as a potential therapeutic target for preventing, treating, or ameliorating CVD while avoiding significant side effects, though no mechanism by which to modulate galactosylation was proposed. The present disclosure aims to provide one or more alternative and/or improved techniques, compounds and/or compositions for use in the treatment of CVD.

### SUMMARY OF THE INVENTION

[0007] The present disclosure provides an RNA editing oligonucleotide (EON) that can form a double-stranded complex with a region of a target RNA nucleic acid molecule in a human cell, wherein the double-stranded complex can recruit an endogenous ADAR enzyme naturally present in the cell, wherein the region comprises a target adenosine, wherein the nucleotide in the EON that is opposite the target adenosine is the orphan nucleotide, wherein the ADAR enzyme deaminates the target adenosine into an inosine, and wherein the target RNA nucleic acid molecule is a transcript molecule of the human β-1,4-galactosyl-transferase 1 (B4GALT1) gene. In a preferred aspect, the B4GALT1 transcript molecule is a pre-mRNA or an mRNA molecule. In another preferred aspect, the cell is a human liver cell, preferably a hepatocyte.

[0008] In one aspect, the target adenosine in the B4GALT1 transcript molecule is at a position where a guanosine would encode a B4GALT1 protein variant that has a reduced enzymatic turnover rate. In a preferred aspect, the target adenosine is at position c. 1055A in the B4GALT1 transcript, and wherein the deamination results in a change from asparagine (N; Asn; encoded by an AAU codon) to serine (S; Ser; encoded by an AGU codon) at position 352 in the human wildtype B4GALT1 amino acid sequence.

[0009] The disclosure provides an EON as disclosed herein, wherein at least one nucleotide comprises one or more non-naturally occurring chemical modifications in the ribose, linkage, or base moiety, with the proviso that the orphan nucleotide is not a cytidine comprising a 2′-OMe ribose substitution. In a preferred aspect, the one or more modifications in the linkage is each independently selected from a phosphorothioate (PS), a phosphonoacetate, phosphorodithioate, a methylphosphonate (MP), a sulfonylphosphoramidate, or a PNdmi internucleoside linkage. In a preferred aspect, the one or more modifications in the ribose moiety is a mono- or di-substitution at the 2′, 3′ and/or 5′ position of the ribose, each independently selected from the group consisting of: —OH; —F; substituted or unsubstituted, linear or branched lower (C₁-C₁₀) alkyl, alkenyl, alkynyl, alkaryl, allyl, or aralkyl, that may be interrupted by one or more heteroatoms; —O-, S-, or N-alkyl; —O-, S-, or N-alkenyl; —O-, S-, or N-alkynyl; —O-, S-, or N-allyl; —O-alkyl-O-alkyl; -methoxy; -aminopropoxy; -methoxyethoxy; -dimethylamino oxyethoxy; and -dimethylaminoethoxyethoxy.

[0010] Provided herein is an EON, wherein the EON comprises or consists of an EON selected from the group provided in SEQ ID NO:3 to 42, 59 to 1069, and 1078 to 1190, preferably from the group consisting of SEQ ID NO:23, 19, 31, 27, 35, 39, 69, 70, 71, 72, 73, 93, 94, 95, 1079, 1084, 1093, 1095, 1100, 1102, 1115, 1121, 1123, 1124, and 1139 to 1190. Importantly, provided herein is an EON that comprises a base nucleotide sequence according to these preferred EONs that are further modified as outlined herein, which means that these preferred EONs may even be further optimized to reach an even more efficient RNA editing effect, using the teaching provided herein. In a preferred aspect, the orphan nucleotide in the EON as disclosed herein is a deoxynucleotide carrying a 6-amino-5-nitro-3-yl-2 (1H)-pyridone nucleobase (Benner's base Z) or an iso-uracil nucleobase (isoU).

[0011] Provided herein is also a vector, preferably a viral vector, more preferably an adeno-associated virus (AAV) vector, comprising a nucleic acid molecule encoding an EON as disclosed herein. Provided herein is also a nanoparticle delivery vehicle formulation that comprises an EON as disclosed herein. In a preferred aspect, the nanoparticle delivery vehicle is a Lipid Nanoparticle (LNP). Provided herein is also a pharmaceutical composition comprising an EON, a vector, or a nanoparticle delivery vehicle formulation, as disclosed herein, and a pharmaceutically acceptable carrier.

[0012] In one aspect, the disclosure provides an EON, a vector, a nanoparticle delivery vehicle formulation, or a pharmaceutical composition, as disclosed herein, for use in the treatment of CVD.

[0013] In one aspect, the disclosure provides a use of an EON, a vector, a nanoparticle delivery vehicle formulation, or a pharmaceutical composition, as disclosed herein, in the manufacture of a medicament for the treatment of CVD.

[0014] In one aspect, the disclosure provides an in vitro, ex vivo, or in vivo method of editing a B4GALT1 transcript molecule, the method comprising contacting the B4GALT1 transcript molecule, or a part thereof, with an EON as disclosed herein, thereby allowing the formation of a double-stranded complex of the EON with the B4GALT1 transcript molecule, thereby enabling the recruitment of an ADAR1 or ADAR2 deamination enzyme that binds to the double-stranded complex, and therethrough allowing the specific editing of an adenosine in the B4GALT1 transcript molecule, by the deamination enzyme, into an inosine.

[0015] In one aspect, the disclosure provides a method of treating, slowing down, or ameliorating CVD in a patient in need thereof, the method comprising contacting a B4GALT1 transcript molecule in a cell of the subject with an EON as disclosed herein, thereby treating the patient.

[0016] In one aspect, the disclosure provides a method for the deamination of a target adenosine in an B4GALT1 transcript molecule in a cell, the method comprising the steps of: (i) providing the cell with an EON, a vector, or a nanoparticle delivery vehicle formulation, as disclosed herein; (ii) allowing uptake by the cell of the EON, the vector, or the nanoparticle delivery vehicle; (iii) allowing annealing of the EON to the B4GALT1 transcript molecule; (iv) allowing an endogenous ADAR enzyme that is naturally present in the cell to deaminate the target adenosine in the B4GALT1 transcript molecule to an inosine; and optionally (v) identifying the presence of the inosine in the target RNA molecule. In a preferred aspect, the cell is a human cell, preferably a liver cell, more preferably a hepatocyte, wherein the target adenosine is at position c. 1055A in the B4GALT1 transcript, and wherein the deamination results in a change from asparagine (N; Asn) to serine (S; Ser) at position 352 in the human wildtype B4GALT1 amino acid sequence. In a preferred aspect, step (v) of the method as disclosed herein comprises: a) sequencing the B4GALT1 pre-mRNA or mRNA molecule, or a cDNA derived thereof; b) assessing the presence of a 352Ser B4GALT1 protein variant; or c) using a functional read-out, preferably assessing a reduction rate of UDP-Gal, or assessing glycosylation levels of transferrin in serum.

### BRIEF DESCRIPTION OF THE DRAWINGS

[0017] One or aspects will now be described, by way of example only, with reference to the accompanying drawings:

[0018] FIG. 1A shows a nucleotide sequence of a wildtype human B4GALT1 RNA transcript from start codon to stop codon, showing the start codon and stop codon, wherein the target adenosine at nucleotide position 1055 (in the AAU codon encoding asparagine at amino acid position 352) is shown in bold font. FIG. 1B shows an amino acid sequence of a human wildtype B4GALT1 protein, wherein the asparagine at amino acid position 352 (N) is shown in bold font.

[0019] FIG. 2 shows sequences (5′ to 3′) of EONs designed for editing the B4GALT1 transcript, with their respective SEQ ID NO's as shown. RM4838/EON13 is also referred to as B4GALT1-13. RM4830/EON05 is also referred to as B4GALT1-05. The chemical modifications of the EONs are as follows: m5Ue is 2′-MOE modified 5-methyl-uridine (similar to a 2′-MOE modified thymidine); m5Ce is 2′-MOE modified 5-methyl-cytidine; Ae and Ge are 2′-MOE modified adenosine and guanosine, respectively; Gm, Am, Um, and Cm are 2′-OMe modified guanosine, adenosine, uridine, and cytidine, respectively; Af, Uf, Gf, and Cf are 2′-F modified adenosine, uridine, guanosine, and cytosine, respectively; Zd (at the orphan nucleotide position) is a cytidine analog that is also referred to as a nucleoside carrying a Benner's base (as further outlined herein), with a deoxy moiety (=DNA) at the 2′ ribose position; C2f (at the orphan nucleotide position) is a 2′,2′-difluoro modified cytidine; m5Ud (or simply referred to as Ud) is a deoxynucleotide with a 5-methyl-uridine base; Cd (at the orphan nucleotide position) is deoxycytidine; an asterisk * refers to a PS linkage; a “!” refers to a PNdmi linkage; and a “\hat{ }” refers to a MP linkage. All other linkages are phosphodiester linkages.

[0020] FIG. 3 shows the percentage editing of endogenous B4GALT1 transcripts in human HepG2 cells after treatment with the indicated EONs in two different concentrations (1 and 5 μM) and saponin (AG1856). Negative controls were AG1856 only and non-treated cells.

[0021] FIG. 4 shows the percentage exon 5 skip in endogenous B4GALT1 pre-mRNA in human HepG2 cells after treatment with the indicated EONs in two different concentrations (1 and 5 μM) and saponin (AG1856). Negative controls were AG1856 only and non-treated cells.

[0022] FIG. 5 shows (A) the percentage editing of endogenous B4GALT1 transcripts in liver spheroids generated from primary human hepatocytes, after treatment with the four indicated EONs, and (B) the percentage exon 5 skipping in these same samples. Negative controls were saponin alone (NT+AG) and non-treated cells.

[0023] FIG. 6 shows a set of EONs (SEQ ID NO:62 to 108, as indicated) designed with the addition of a GalNAc moiety attached to the 5′ terminus of the oligonucleotide. The EON of SEQ ID NO: 1069 (B4GALT1-134(−)) is the same as the EON of SEQ ID NO:72 (B4GALT1-134), but without the GalNAc moiety and the linker between the GalNAc and the oligonucleotide. The chemical modifications are as provided in FIG. 2. L001 is a tri-antennary GalNAc moiety (OP-042; Hongene Biotech). L103 is a TEG linker linking the GalNAc moiety to the first nucleotide on the 5′ terminus.

[0024] FIG. 7 (A) shows the editing percentage of the human B4GALT1 target transcript in primary human hepatocytes (PHH) after treatment with 5 μM EON in the presence of 1 μM saponin (AG1856), using the EONs of FIG. 6 together with EON01 and EON05 (see FIG. 2). A non-treated (NT) sample was taken as negative control. (B) shows the percentage of exon 5 skip observed in the same samples.

[0025] FIG. 8(A) shows the editing percentage of the human B4GALT1 target transcript in PHH after treatment with 5 μM EON in the absence of saponin, hence through gymnotic uptake, using the EONs of FIG. 6 together with EON01 and EON05 (see FIG. 2). A non-treated (NT) sample was taken as negative control. (B) shows the percentage of exon 5 skip observed in the same samples.

[0026] FIG. 9(A) shows the editing percentage of the B4GALT1 target transcript in primary mouse hepatocytes (PMH) after treatment with 5 μM EON in the absence of saponin, hence through gymnotic uptake, using the EONs of FIG. 6 together with EON01 and EON05 (see FIG. 2). A non-treated (NT) sample was taken as negative control. (B) shows the percentage of exon 5 skip observed in the same samples.

[0027] FIG. 10(A) shows the editing percentage of the B4GALT1 target transcript in PHH after treatment with EONs that were formulated in LNPs. The LNP formulations with the indicated EONs were administered to the cells in the concentration indicated on the right. The untreated sample was a single sample since no LNP was administered there. (B) shows the percentage of exon 5 skip observed in the same samples.

[0028] FIG. 11(A) shows the editing percentage of the B4GALT1 target transcript in vivo in mouse liver cells, after IV injection of LNP formulations comprising RNA editing oligonucleotides EON05, EON13, or EON134, as outlined in example 8, on day 2, 4, 7, and 30 after administration. PBS administration and an Actin B targeting oligonucleotide (RM3891) formulated in LNP served as a negative control for B4GALT1 editing and as a positive control for editing in general (on the Actin B target), which was around 40% on day 4 after administration (data not shown). (B) shows the percentage of exon 5 skip observed in the same samples.

[0029] FIG. 12 shows an additional set of 960 EONs with chemical modifications as given in FIG. 2. The respective SEQ ID NO's are given next to the RM number.

[0030] FIG. 13 shows an additional set of 22 EONs with chemical modifications as given in FIG. 2. The respective SEQ ID NO's are given next to the RM number. A “#” refers to a PNms linkage.

[0031] FIG. 14 shows the percentage editing of the B4GALT1 transcript in PHHs after treatment with the indicated EONs. B4GALT1-69=RM107689 and B4GALT1-84=RM107704 in FIG. 2.

[0032] FIG. 15(A) shows the schematic position of nine sequence sets (EONs) towards the exon 5-exon 6 boundary in the B4GALT1 transcript, with set #9 being most outside exon 5. Several EONs (details not shown) with a variety of modifications generally as outlined herein were designed for each set to test the effect on exon 5 skipping. (B) shows the results of these exon skipping experiments, with all generated EONs having separate bars, but with the nine separate sets of sequences indicated below the graph. RM105550 (=B4GALT-13 with GalNAc at the 5′ side, but without TEG linker) served as a positive control. A non-treated sample (NT) served as a negative control.

[0033] FIG. 16 shows a set of EONs with a variety of modifications related to 2′-F at different positions, with SEQ ID NO: 1101-1120 being related to the original design of SEQ ID NO:1100 (B4GALT1-13) and SEQ ID NO: 1122-1138 being related to the original design of SEQ ID NO: 1121 (B4GALT1-21). All modifications are as provided in FIGS. 2 and 6. No TEG linker is present between the L001 GalNAc moiety and the most terminal 5′ nucleotide.

[0034] FIG. 17 (A) shows the editing percentages (left y-axis) and the exon 5 skipping percentages (right y-axis) in PHHs treated with the indicated EONs. A non-treated (NT) sample served as a negative control and RM106564 (EON13) served as the control for reference. (B) shows the results of an identical experiment using a different set of EONs in which two non-treated samples served as negative controls and RM106566 (EON21) served as the reference control.

### DETAILED DESCRIPTION

[0035] It was realized that it is possible to target the B4GALT1 transcript to modulate the activity of the B4GALT1 enzyme, and thereby prevent, ameliorate, or treat CVD. This technology is generally referred to as “RNA editing”. Disclosed herein are oligonucleotides that can be used to specifically deaminate a specific target adenosine in the transcript of the (human) B4GALT1 transcript (pre-mRNA and/or mRNA) in vivo, preferably using endogenous deaminating enzymes, to produce a B4GALT1 enzyme variant with reduced galactosyltrasferase activity. A particularly preferred target adenosine is the one found in the codon for asparagine at amino acid position 352 (Asn352), wherein deamination leads to a codon that encodes serine (Ser352), but the RNA editing technology as disclosed herein is also applicable to other target adenosines within B4GALT1 that may be targeted to reduce galactosyltransferase turnover rate.

[0036] RNA editing is a natural process through which eukaryotic cells alter the sequence of their RNA molecules, often in a site-specific and precise way, thereby increasing the repertoire of genome encoded RNAs by several orders of magnitude. RNA editing enzymes have been described for eukaryotic species throughout the animal and plant kingdoms, and these processes play an important role in managing cellular homeostasis in metazoans from the simplest life forms (such as Caenorhabditis elegans) to humans. Examples of RNA editing are adenosine (A) to inosine (I) conversions and cytidine (C) to uridine (U) conversions, which occur through enzymes called Adenosine Deaminases acting on RNA (ADAR) and APOBEC/AID (cytidine deaminases that act on RNA), respectively.

[0037] ADAR is a multi-domain protein, comprising a catalytic domain, and two to three double-stranded RNA recognition domains, depending on the enzyme in question. Each recognition domain recognizes a specific double stranded RNA (dsRNA) sequence and/or conformation. The catalytic domain does also play a role in recognizing and binding a part of the dsRNA helix, although the key function of the catalytic domain is to convert an A into I in a nearby, predefined, position in the target RNA, by deamination of the nucleobase. Inosine is read as guanosine by the translational machinery of the cell, meaning that, if an edited adenosine is in a coding region of an mRNA or pre-mRNA, it can recode the protein sequence. A to I conversions may also occur in 5′ non-coding sequences of a target mRNA, creating new translational start sites upstream of the original start site, which gives rise to N-terminally extended proteins, or in the 3′ UTR or other non-coding parts of the transcript, which may affect the processing and/or stability of the RNA. In addition, A to I conversions may take place in splice elements in introns or exons in pre-mRNAs, thereby altering the pattern of splicing. As a result, exons may be included or skipped. The enzymes catalysing adenosine deamination are within an enzyme family of ADARs, which include human deaminases hADAR1 and hADAR2, as well as hADAR3. However, for hADAR3 no deaminase activity has been demonstrated.

[0038] The use of oligonucleotides to edit a target RNA applying adenosine deaminase has been described (e.g., Woolf et al. 1995. Proc Natl Acad Sci USA 92:8298-8302; Montiel-Gonzalez et al. 2013. Proc Natl Acad Sci USA 110 (45): 18285-18290; Vogel et al. 2014. Angewandte Chemie Int Ed 53:267-271). A disadvantage of the method described by Montiel-Gonzalez et al. (2013, supra) is the need for a fusion protein consisting of the boxB recognition domain of bacteriophage lambda N-protein, genetically fused to the adenosine deaminase domain of a truncated natural ADAR protein. It requires target cells to be either transduced with the fusion protein, which is a major hurdle, or that target cells are transfected with a nucleic acid construct encoding the engineered adenosine deaminase fusion protein for expression. The system described by Vogel et al. (2014, supra) suffers from similar drawbacks, in that it is not clear how to apply the system without having to genetically modify the ADAR first and subsequently transfect or transform the cells harboring the target RNA, to provide the cells with this genetically engineered protein. U.S. Pat. No. 9,650,627 describes a similar system. The oligonucleotides of Woolf et al. (1995, supra) that were 100% complementary to the target RNA sequences suffered from severe lack of specificity: nearly all adenosines in the target RNA strand that was complementary to the antisense oligonucleotide were edited.

[0039] It is known that ADAR may act on any dsRNA. Through a process sometimes referred to as ‘promiscuous editing’ the enzyme will edit multiple A's in the dsRNA. Hence, there was a need for methods and means that circumvent such promiscuous editing and only target specific adenosines in a target RNA molecule to become therapeutic applicable. Vogel et al. (2014, supra) showed that such off-target editing can be suppressed by using 2′-O-methyl(2′-OMe) modified nucleosides in the oligonucleotide at positions opposite to adenosines that should not be edited and used a non-modified nucleoside directly opposite to the specifically targeted adenosine on the target RNA. However, the specific editing effect at the target nucleotide has not been shown to take place without the use of recombinant ADAR enzymes having covalent bonds with the EON. Several publications have now shown that the recruitment of endogenous ADAR (hence without the need for an exogenous and/or recombinant source) is feasible while maintaining a specificity in which a single adenosine within a target RNA molecule can be targeted and deaminated to an inosine. WO2016/097212 discloses antisense oligonucleotides (AONs) for the targeted editing of RNA, wherein the AONs are characterized by a sequence that is complementary to a target RNA sequence (therein referred to as the ‘targeting portion’) and by the presence of a stem-loop/hairpin structure (therein referred to as the ‘recruitment portion’), which is preferably non-complementary to the target RNA. Such oligonucleotides are referred to as ‘self-looping AONs’. The recruitment portion acts in recruiting a natural ADAR enzyme present in the cell to the dsRNA formed by hybridization of the target sequence with the targeting portion. Due to the recruitment portion, there is no need for conjugated entities or presence of modified recombinant ADAR enzymes. WO2016/097212 describes the recruitment portion as being a stem-loop structure mimicking either a natural substrate (e.g., the GluB receptor) or a Z-DNA structure known to be recognized by the dsRNA binding domains, or Z-DNA binding domains, of ADAR enzymes. A stem-loop structure can be an intermolecular stem-loop structure, formed by two separate nucleic acid strands, or an intramolecular stem loop structure, formed within a single nucleic acid strand. The stem-loop structure of the recruitment portion as described is an intramolecular stem-loop structure, formed within the AON itself, and are thought to attract (endogenous) ADAR. Similar stem-loop structure-comprising systems for RNA editing have been described in WO2017/050306, WO2020/001793, WO2017/010556, WO2020/246560, and WO2022/078995.

[0040] WO2017/220751 and WO2018/041973 describe a next generation type of AONs that do not comprise such a stem-loop structure but that are (almost fully) complementary to the targeted area. In one embodiment, one or more mismatching nucleotides, wobbles, or bulges exist between the oligonucleotide and the target sequence. A sole mismatch may be at the site of the nucleoside opposite the target adenosine, but in other embodiments AONs (or RNA editing oligonucleotides, abbreviated to ‘EONs’) were described with multiple bulges and/or wobbles when attached to the target sequence area. It appeared possible to achieve in vitro, ex vivo and in vivo RNA editing with EONs lacking a stem-loop structure and with endogenous ADAR enzymes when the sequence of the EON was carefully selected such that it could attract/recruit ADAR. The ‘orphan nucleoside’, which is defined as the nucleoside in the EON that is positioned directly opposite the target adenosine in the target RNA molecule, did not carry a 2′-OMe modification. The orphan nucleoside can be a deoxyribonucleoside (DNA), wherein the remainder of the EON could still carry 2′-O-alkyl modifications at the sugar entity (such as 2′-OMe), or the nucleotides directly surrounding the orphan nucleoside contained chemical modifications (such as DNA in comparison to RNA) that further improved the RNA editing efficiency and/or increased the resistance against nucleases. Such effects could even be further improved by using sense oligonucleotides (SONs) that ‘protected’ the EONs against breakdown (described in WO2018/134301). The use of chemical modifications and particular structures in oligonucleotides that could be used in ADAR-mediated editing of specific adenosines in a target RNA have been the subject of numerous publications in the field, such as WO2019/111957, WO2019/158475, WO2020/165077, WO2020/201406, WO2020/211780, WO2021/008447, WO2021/020550, WO2021/060527, WO2021/117729, WO2021/136408, WO2021/182474, WO2021/216853, WO2021/242778, WO2021/242870, WO2021/242889, WO2022/007803, WO2022/018207, WO2022/026928, and WO2022/124345. The use of specific sugar moieties has been disclosed in for instance WO2020/154342, WO2020/154343, WO2020/154344, WO2022/103839, and WO2022/103852, whereas the use of stereo-defined linker moieties (in general for oligonucleotides that for instance can be used for exon skipping, in gapmers, in siRNA, or specifically for RNA-editing oligonucleotides, related to a wide variety of target sequences) has been described in WO2011/005761, WO2014/010250, WO2014/012081, WO2015/107425, WO2017/015575 (HTT), WO2017/062862, WO2017/160741, WO2017/192664, WO2017/192679 (DMD), WO2017/198775, WO2017/210647, WO2018/067973, WO2018/098264, WO2018/223056 (PNPLA3), WO2018/223073 (APOC3), WO2018/223081 (PNPLA3), WO2018/237194, WO2019/032607 (C9orf72), WO2019/055951, WO2019/075357 (SMA/ALS), WO2019/200185 (DM1), WO2019/217784 (DM1), WO2019/219581, WO2020/118246 (DM1), WO2020/191252, WO2020/196662, WO2020/219981 (USH2A), WO2020/219983 (RHO), WO2020/227691 (C9orf72), WO2021/071788 (C9orf72), WO2021/071858, WO2021/178237 (MAPT), WO2021/234459, WO2021/237223, and WO2022/099159. Next to these disclosures, an extensive number of publications relate to the targeting of specific RNA target molecules, or specific adenosines within such RNA target molecules, be it to repair a mutation that resulted in a premature stop codon, or other mutation causing disease. Examples of such disclosures in which adenosines are targeted within specified target RNA molecules are WO2020/157008 and WO2021/136404 (USH2A); WO2021/113270 (APP); WO2021/113390 (CMT1A); WO2021/209010 (IDUA, Hurler syndrome); WO2021/231673 and WO2021/242903 (LRRK2); WO2021/231675 (ASS1); WO2021/231679 (GJB2); WO2019/071274 and WO2021/231680 (MECP2); WO2021/231685 and WO2021/231692 (OTOF, autosomal recessive non-syndromic hearing loss); WO2021/231691 (XLRS); WO2021/231698 (argininosuccinate lyase deficiency); WO2021/130313 and WO2021/231830 (ABCA4); and WO2021/243023 (SERPINA1).

### EMBODIMENTS

[0041] According to one aspect, the disclosure provides an EON that can form a double-stranded complex with a region of an endogenous human B4GALT1 transcript molecule in a cell, wherein the region of the B4GALT1 transcript molecule, or a part thereof comprises a target adenosine, wherein the nucleotide in the EON that is opposite the target adenosine is the orphan nucleotide, and wherein the double-stranded complex can recruit an endogenous ADAR enzyme present in the cell to deaminate the target adenosine into an inosine, thereby editing the B4GALT1 transcript molecule.

[0042] According to one aspect, the disclosure provides an EON that can form a double-stranded complex with a region of an endogenous human B4GALT1 transcript molecule in a cell, wherein the region of the B4GALT1 transcript molecule, or a part thereof comprises a target adenosine, wherein the nucleotide in the EON that is opposite the target adenosine is the orphan nucleotide, and wherein the double-stranded complex can recruit an endogenous ADAR enzyme present in the cell to deaminate the target adenosine into an inosine, thereby editing the B4GALT1 transcript molecule, and wherein the EON causes a splice modulation event, preferably wherein exon 5 is skipped from the pre-mRNA, thereby removing the exon including the target adenosine (be it edited or not) from the transcript, leaving an mRNA that does not translate to a functional B4GALT1 protein. The splice modulation event may be exon 5 skipping, may be an aberrant exon skip, may be exon 4+exon 5 skipping, may be intron inclusion, and may be a (partial) skip of exon 6.

[0043] In one aspect, the B4GALT1 transcript molecule is a pre-mRNA or an mRNA molecule.

[0044] In one aspect, the cell is a human liver cell, preferably a hepatocyte.

[0045] In one aspect, the target adenosine is at a position in the B4GALT1 transcript where a guanosine results in a B4GALT1 protein variant that has a reduced enzymatic turnover rate.

[0046] In one aspect, the target adenosine is at position c. 1055A in the B4GALT1 transcript.

[0047] In one aspect, the region of the B4GALT1 transcript molecule, or a part thereof, comprises the sequence: 5′- . . . CCCAAUCCU . . . -3′, wherein A is the target adenosine.

[0048] In one aspect, the EON comprises or consists of an EON, individually selected from the group consisting of the EONs as provided in detail in SEQ ID NO:3 to 42, 59 to 1069, and 1078 to 1190, preferably from the group consisting of SEQ ID NO:23, 19, 31, 27, 35, 39, 69, 70, 71, 72, 73, 93, 94, 95, 1079, 1084, 1093, 1095, 1100, 1102, 1115, 1121, 1123, 1124, and 1139 to 1190.

[0049] In one aspect, the EON comprises or consists of the basic nucleotide sequence as provided in any one of SEQ ID NO: 1139 to 1190, wherein:
[0050] the EON may comprise a GalNAc moiety (such as the L001 disclosed herein), wherein the GalNAc moiety may be linked to the EON via a linker (such as the L103 TEG linker as disclosed herein);
[0051] the EON may comprise nucleotides that are modified in the sugar moiety as disclosed herein, preferably selected from the group consisting of LNA, 2′-MOE, 2′-OMe, 2′-F, and 2′-H (DNA);
[0052] the EON may comprise nucleotides that are modified in the nucleobase moiety as disclosed herein;
[0053] the EON may comprise nucleosides that are linked to each other with a linkage as disclosed herein, preferably selected from the group consisting of PS, PNdmi, MP, and PNms;
[0054] the EON comprises an orphan nucleotide that is preferably a deoxynucleotide that comprises a cytosine base, a uracil base, an iso-uracil base, or a cytosine analogue, more preferably a Benner's base;
[0055] the EON comprises a nucleotide at position-1 that is preferably a deoxynucleotide;
[0056] the EON comprises a nucleotide at position+1 that is preferably a deoxynucleotide or a 2′-MOE modified nucleotide;
[0057] the EON comprises a linkage at linkage position-2 that is preferably a MP linkage or a PNms linkage;
[0058] the EON comprises a linkage at linkage position-1 that is preferably a PS linkage;
[0059] the EON comprises at positions+1, 0, and −1 the sequence 5′-AXU-3′, wherein
   [0060] a) A is a nucleoside carrying an adenine base, preferably wherein A is a deoxyadenosine (Ad) or a 2′-MOE modified adenosine (Ae);
   [0061] b) X is the orphan nucleotide, which is a deoxynucleotide comprising a modification as disclosed herein, preferably comprising a Benner's base (Zd) or an iso-uracil (8d); and
   [0062] c) U is a nucleoside carrying a uracil base, preferably wherein U is a deoxyuridine (Ud, or m5Ud);
[0063] the EON may comprise a PNdmi linkage connecting the ultimate 5′ nucleoside to its neighbouring nucleoside; and/or
[0064] the EON may comprise a PNdmi linkage connecting the ultimate 3′ nucleoside to its neighbouring nucleoside.

[0065] SEQ ID NO: 1139 to 1151 are as follows (from 5′ to 3′), wherein X is the orphan nucleotide, which is preferably a deoxynucleotide carrying a Benner's base (Zd), and the sequence of positions +1, 0, and −1 (sometimes referred to as the “Central Triplet”) is underlined:

1139
CCUCUGAGGAXUGGGUUCAUUU
1140
CCUCUGAGGAXUGGGUUCAUUUUU
1141
AACCUCUGAGGAXUGGGUUCAUUU
1142
AACCUCUGAGGAXUGGGUUCAUUUU
1143
ACCUCUGAGGAXUGGGUUCAUUUUU
1144
AACCUCUGAGGAXUGGGUUCAUUUUU
1145
CACCUCUGAGGAXUGGGUUCAUUUUU
1146
GCACCUCUGAGGAXUGGGUUCAUUUUU
1147
CAAACCUCUGAGGAXUGGGUUCAUUUUU
1148
CGGUCAAACCUCUGAGGAXUGGGUUCAU
1149
GUCAAACCUCUGAGGAXUGGGUUCAUUUUU
1150
CGGUCAAACCUCUGAGGAXUGGGUUCAUUU
1151
CGGUCAAACCUCUGAGGAXUGGGUUCAUUUUU

[0066] SEQ ID NO:1152 to 1164 are as follows (from 5′ to 3′), wherein X is the orphan nucleotide, which is preferably a deoxycytidine, and the sequence of positions +1, 0, and −1 (sometimes referred to as the “Central Triplet”) is underlined:

1152
CCUCUGAGGAXUGGGUUCAUUU
1153
CCUCUGAGGAXUGGGUUCAUUUUU
1154
AACCUCUGAGGAXUGGGUUCAUUU
1155
AACCUCUGAGGAXUGGGUUCAUUUU
1156
ACCUCUGAGGAXUGGGUUCAUUUUU
1157
AACCUCUGAGGAXUGGGUUCAUUUUU
1158
CACCUCUGAGGAXUGGGUUCAUUUUU
1159
GCACCUCUGAGGAXUGGGUUCAUUUUU
1160
CAAACCUCUGAGGAXUGGGUUCAUUUUU
1161
CGGUCAAACCUCUGAGGAXUGGGUUCAU
1162
GUCAAACCUCUGAGGAXUGGGUUCAUUUUU
1163
CGGUCAAACCUCUGAGGAXUGGGUUCAUUU
1164
CGGUCAAACCUCUGAGGAXUGGGUUCAUUUUU

[0067] SEQ ID NO:1165 to 1177 are as follows (from 5′ to 3′), wherein X is the orphan nucleotide, which is preferably a deoxyuridine, and the sequence of positions +1, 0, and −1 (sometimes referred to as the “Central Triplet”) is underlined:

1165
CCUCUGAGGAXUGGGUUCAUUU
1166
CCUCUGAGGAXUGGGUUCAUUUUU
1167
AACCUCUGAGGAXUGGGUUCAUUU
1168
AACCUCUGAGGAXUGGGUUCAUUUU
1169
ACCUCUGAGGAXUGGGUUCAUUUUU
1170
AACCUCUGAGGAXUGGGUUCAUUUUU
1171
CACCUCUGAGGAXUGGGUUCAUUUUU
1172
GCACCUCUGAGGAXUGGGUUCAUUUUU
1173
CAAACCUCUGAGGAXUGGGUUCAUUUUU
1174
CGGUCAAACCUCUGAGGAXUGGGUUCAU
1175
GUCAAACCUCUGAGGAXUGGGUUCAUUUUU
1176
CGGUCAAACCUCUGAGGAXUGGGUUCAUUU
1177
CGGUCAAACCUCUGAGGAXUGGGUUCAUUUUU

[0068] SEQ ID NO: 1178 to 1190 are as follows (from 5′ to 3′), wherein X is the orphan nucleotide, which is preferably a deoxynucleotide carrying an iso-uracil base, and the sequence of positions +1, 0, and −1 (sometimes referred to as the “Central Triplet”) is underlined:

1178
CCUCUGAGGAXUGGGUUCAUUU
1179
CCUCUGAGGAXUGGGUUCAUUUUU
1180
AACCUCUGAGGAXUGGGUUCAUUU
1181
AACCUCUGAGGAXUGGGUUCAUUUU
1182
ACCUCUGAGGAXUGGGUUCAUUUUU
1183
AACCUCUGAGGAXUGGGUUCAUUUUU
1184
CACCUCUGAGGAXUGGGUUCAUUUUU
1185
GCACCUCUGAGGAXUGGGUUCAUUUUU
1186
CAAACCUCUGAGGAXUGGGUUCAUUUUU
1187
CGGUCAAACCUCUGAGGAXUGGGUUCAU
1188
GUCAAACCUCUGAGGAXUGGGUUCAUUUUU
1189
CGGUCAAACCUCUGAGGAXUGGGUUCAUUU
1190
CGGUCAAACCUCUGAGGAXUGGGUUCAUUUUU

[0069] In one aspect, at least one nucleotide of the EON as disclosed herein comprises one or more non-naturally occurring chemical modifications, or one or more additional non-naturally occurring chemical modifications, in the ribose, linkage, or base moiety, with the proviso that the orphan nucleotide is not a cytidine comprising a 2′-OMe ribose substitution.

[0070] In one aspect, the one or more additional modifications in the linkage moiety is each independently selected from a PS, phosphonoacetate, phosphorodithioate, MP, sulfonylphosphoramidate, or PNdmi internucleotide linkage.

[0071] In one aspect, the EON as disclosed herein comprises one or more nucleotides comprising a mono- or di-substitution at the 2′, 3′ and/or 5′ position of the ribose, each independently selected from the group consisting of: —OH; —F; substituted or unsubstituted, linear or branched lower (C₁-C₁₀) alkyl, alkenyl, alkynyl, alkaryl, allyl, or aralkyl, that may be interrupted by one or more heteroatoms; —O-, S-, or N-alkyl; —O-, S-, or N-alkenyl; —O-, S-, or N-alkynyl; —O—, S-, or N-allyl; —O-alkyl-O-alkyl; -methoxy; -aminopropoxy; -methoxyethoxy; -dimethylamino oxyethoxy; and -dimethylaminoethoxyethoxy.

[0072] According to one aspect, disclosed herein is a vector, preferably a viral vector, more preferably an AAV vector, comprising a nucleic acid molecule encoding an EON as disclosed herein.

[0073] According to one aspect, disclosed herein is a nanoparticle delivery vehicle formulation comprising an EON as disclosed herein. Preferably, the nanoparticle delivery vehicle formulation as disclosed herein is a LNP formulation.

[0074] According to one aspect, disclosed herein is a method of editing a B4GALT1 polynucleotide, the method comprising contacting the B4GALT1 polynucleotide with an EON as disclosed herein to cause an adenosine deaminase acting on RNA (ADAR)-mediated adenosine to inosine alteration of an adenosine associated with CVD, thereby editing the B4GALT1 polynucleotide. The polynucleotide is preferably a pre-mRNA or an mRNA molecule.

[0075] According to one aspect, disclosed herein is a method of treating CVD in a patient in need thereof, the method comprising contacting a B4GALT1 polynucleotide in a cell of the subject with an EON, a vector, a nanoparticle delivery vehicle formulation, or a pharmaceutical composition as disclosed herein to cause an ADAR-mediated adenosine to inosine alteration of an adenosine associated with CVD, thereby treating the patient.

[0076] According to one aspect, disclosed herein is a method of treating CVD, the method comprising administering to a patient in need thereof a therapeutically effective amount of an EON, a vector, a nanoparticle delivery vehicle formulation, or a pharmaceutical composition as disclosed herein, thereby treating the CVD.

[0077] According to one aspect, herein is provided a method for the deamination of a target adenosine in a human B4GALT1 pre-mRNA or mRNA molecule in a cell, the method comprising the steps of: (i) providing the cell with an EON as disclosed herein; (ii) allowing uptake by the cell of the EON; (iii) allowing annealing of the EON to the B4GALT1 pre-mRNA or mRNA molecule; (iv) allowing an endogenous ADAR enzyme to deaminate the target adenosine in the target RNA molecule to an inosine; and optionally (v) identifying the presence of the inosine in the target RNA molecule. In one aspect, the target adenosine is the c. 1055A position in the B4GALT1 pre-mRNA or mRNA molecule. In one aspect, step (v) comprises: a) determining the sequence of the B4GALT1 pre-mRNA or mRNA molecule; b) assessing the presence of a 352Ser B4GALT1 protein variant; or c) using a functional read-out, preferably assessing a reduction rate of UDP-Gal, or assessing glycosylation levels of transferrin in serum.

[0078] The present disclosure provides EONs that can produce RNA editing of a target adenosine in the human B4GALT1 transcript (pre-mRNA and/or mRNA) which produces a B4GALT1 enzyme variant that has a reduced turnover rate. In one aspect, the EON results in at least 1%, 2%, 3%, 4%, 5%, 6%, 7%, 8%, 9%, 10%, 15%, 20%, 25%, 30%, 35%, 40%, 45%, 50%, 60%, 70%, 80%, 90% or 100% of the B4GALT1 transcript molecules encoding variant B4GALT1. The target adenosine may be at any position whereby editing results in a reduced turnover rate. Any reduction in turnover rate with respect to the wild-type enzyme can be beneficial. In one embodiment, the reduction in turnover rate of the B4GALT1 variant is at least a 1%, 2%, 3%, 4%, 5%, 6%, 7%, 8%, 9%, 10%, 15%, 20%, 25%, 30%, 35%, 40%, 45%, 50%, 60%, 70%, 80%, 90% or 100% reduction in turnover rate of the variant with respect to the wild-type enzyme. In one embodiment, the reduction in turnover rate can be measured by determining the rate at which the B4GALT1 enzyme can transfer galactose from UDP-Gal to GlcNAc as an acceptor, as described in Montasser et al. (2021, supra). Editing of the target adenosine may reduce turnover rate of the B4GALT1 enzyme variant through different mechanisms, including, for example, mutation of an amino acid residue, generation of an early stop codon, or variation of pre-mRNA splice sites.

[0079] It is additionally noted that the reduction in turnover rate in the system as a whole (for example, in a cellular environment) can depend upon multiple factors, including the reduction in turnover rate of any given enzyme variant, and the ratio of enzyme variant to wild-type enzyme produced in that system, and these can be balanced to produce the desired effect. For instance, Montasser et al. (2021, supra) describe the use of a different editing technique, a gene editing technique that used CRISPR-Cas9 knockdown of the B4GALT1 gene (i.e., to encode fully inactivated B4GALT1). In this model, gene editing was not exhaustive, resulting in 20.7% of the transcripts being active wild-type B4GALT1. This also resulted in an appreciable reduction (50%) in LDL-C. One advantage of the RNA editing approach of the present disclosure is that RNA editing is transient, allowing for much simpler tailoring of the level of transcripts being edited. This can be particularly useful if the level of reduction should be re-evaluated and adjusted on an ongoing basis, depending, for example, on disease progression/regression and or changes in substrate levels in the system.

[0080] In one aspect, the reduction in turnover rate in the system as a whole is at least a 1%, 2%, 3%, 4%, 5%, 6%, 7%, 8%, 9%, 10%, 15%, 20%, 25%, 30%, 35%, 40%, 45% or 50% reduction in turnover rate of the system including the EON with respect to the system without the EON. The ratio of enzyme variant to wild-type enzyme produced in a system can be controlled by choice of reaction conditions (such as concentrations of reactants or choice of temperatures), though in a therapeutic setting this will often be dependent on the dose of EON provided. The skilled person can work with and optimise these factors accordingly to produce optimal reductions in turnover rate in the system as a whole. In one example, the B4GALT1 enzyme variant may be non-functional, but the dose of EON may be controlled so that the system as a whole may still contain a certain level of functional wild-type B4GALT1. This is an important advantage of RNA editing versus DNA editing because editing of the DNA to encode a non-functional B4GALT1 would cause all B4GALT1 enzyme molecules to be non-functional. In one aspect, the wild-type enzyme has the sequence shown in FIG. 1B.

[0081] In one aspect, the EON causes the deamination of the adenosine present at position 1055 of the human mRNA, thereby generating an inosine. In other words, the AAU codon encoding asparagine at amino acid position 352 is converted to an AIU codon, which is read as AGU that encodes serine. In another aspect, an EON as disclosed herein causes the deamination of another adenosine present in the B4GALT1 transcript, which may be any adenosine that, when deaminated into an inosine, results in a B4GALT1 enzyme with a decreased turnover rate. Other mutations may additionally be made in the B4GALT1 gene (and transcript), that may be brought about through RNA editing, to reduce the normal B4GALT1 function. It is to be understood that ‘causing’, ‘triggering’, or ‘producing’ deamination does not mean that the EON itself is editing the adenosine (or has enzymatic activity). The double-stranded complex of the EON with the target RNA molecule is bound to the ADAR enzyme, which acts as the deaminating entity. The ADAR is the enzyme that deaminates, but the EON is responsible for triggering this, at the wanted site.

[0082] In one aspect, the EON as disclosed herein is a single-stranded oligonucleotide comprising an orphan nucleotide that is positioned opposite the target adenosine, wherein the orphan nucleotide is chemically modified as disclosed herein, and wherein the remainder of the oligonucleotide is chemically modified to prevent it from nuclease breakdown also as disclosed herein. In one aspect, the disclosure relates to any kind of oligonucleotide or heteroduplex oligonucleotide complex, that may or may not be bound to hairpin structures (internally or at the terminal end(s)), that may be bound to ADAR or catalytic domains thereof, or wherein the oligonucleotide is expressed through a vector, such as an AAV, or wherein the oligonucleotide is in a circular format. It is to be understood that any kind of oligonucleotide-based RNA editing is encompassed if it relates to the deamination of a nucleotide in the B4GALT1 transcript, preferably to generate the enzyme variant p.Asn352Ser, and causes the reduction in B4GALT1 enzyme function. The protein mutation referred to as p.Asn352Ser may also be referred to as N352S, whereas the adenosine change to guanosine at position 1055 in the B4GALT1 transcript may also be referred to as c. 1055A>G. In one aspect, the EON as disclosed herein is a ‘naked’ oligonucleotide, comprising a variety of chemical modifications in the ribose sugar, the base, and/or the internucleoside linkage of one or more of the nucleotides within the sequence, that can hybridize to the B4GALT1 transcript or a part thereof that includes the target adenosine, and can recruit endogenous ADAR for the deamination of the target adenosine.

### Definitions

[0083] The term ‘nucleoside’ refers to the nucleobase linked to the (deoxy) ribosyl sugar, without phosphate groups. A ‘nucleotide’ is composed of a nucleoside and one or more phosphate groups. The term ‘nucleotide’ thus refers to the respective nucleobase-(deoxy) ribosyl-phospholinker, as well as any chemical modifications of the ribose moiety or the phospho group. Thus, the term would include a nucleotide including a locked ribosyl moiety (comprising a 2′-4′ bridge, comprising a methylene group or any other group), an unlocked nucleic acid (UNA), a threose nucleic acid (TNA), a nucleotide including a linker comprising a phosphodiester, phosphonoacetate, phosphotriester, PS, phosphoro(di)thioate, MP, methyl thiophosphonate, phosphoramidate linkages, and the like. Sometimes the terms adenosine and adenine, guanosine and guanine, cytidine and cytosine, uracil and uridine, thymine and thymidine/uridine, inosine, and hypoxanthine, are used interchangeably to refer to the corresponding nucleobase on the one hand, and the nucleoside or nucleotide on the other. Thymine (T) is also known as 5-methyluracil (m⁵U) and is a uracil (U) derivative; thymine, 5-methyluracil and uracil can be interchanged throughout the disclosure. Likewise, thymidine is also known as 5-methyl-uridine and is a uridine derivative; thymidine, 5-methyl-uridine and uridine can be interchanged throughout the disclosure. Sometimes the terms nucleobase, nucleoside and nucleotide are used interchangeably, unless the context clearly requires differently, for instance when a nucleoside is linked to a neighbouring nucleoside and the linkage between these nucleosides is modified. As stated herein, a nucleotide is a nucleoside plus one or more phosphate groups. The terms ‘ribonucleoside’ and ‘deoxyribonucleoside’, or ‘ribose’ and ‘deoxyribose’ are as used in the art.

[0084] Whenever reference is made to an oligonucleotide, oligo, ON, ASO, oligonucleotide composition, antisense oligonucleotide, AON, (RNA) editing oligonucleotide, EON, and RNA (antisense) oligonucleotide, both oligoribonucleotides and deoxyoligoribonucleotides are meant unless the context dictates otherwise. Potentially the oligonucleotide may completely lack RNA or DNA nucleotides (as they appear in nature) and may consist completely of modified nucleotides. Whenever reference is made to an ‘oligoribonucleotide’ it may comprise the bases A, G, C, U, or I. Whenever reference is made to a ‘deoxyoligoribonucleotide’ it may comprise the bases A, G, C, T, or I. However, an oligonucleotide as disclosed herein may comprise a mix of ribonucleosides and deoxyribonucleosides. When a deoxyribonucleotide is used, hence without a modification at the 2′ position of the sugar, the nucleotide is often abbreviated to Ad. Cd, Gd, Id, Ud, or T in which the ‘d’ represents the deoxy nature of the nucleoside, while a ribonucleoside that is either normal RNA or modified at the 2′ position is often abbreviated without the ‘d’, and often abbreviated with their respective modifications and as explained herein.

[0085] Whenever reference is made to nucleotides in the oligonucleotide, such as cytosine, 5-methylcytosine, 5-hydroxymethylcytosine, 5-formylcytosine, 5-acetylcytosine, 5-hydroxycytosine, and β-D-glucosyl-5-hydroxymethylcytosine are included. Whenever reference is made to adenine, N6-methyladenine, 8-oxo-adenine, 2,6-diaminopurine and 7-methyladenine are included. Whenever reference is made to uracil, dihydrouracil, iso-uracil, N3-glycosylated uracil, pseudouracil, 5-methyluracil, N1-methylpseudouracil, 4-thiouracil and 5-hydroxymethyluracil are included. Whenever reference is made to guanine, 1-methylguanine, 7-methylguanosine, N2,N2-dimethylguanosine, N2,N2,7-trimethylguanosine and N2,7-dimethylguanosine are included. Whenever reference is made to nucleosides or nucleotides, ribofuranose derivatives, such as 2′-deoxy, 2′-hydroxy, and 2′-O-substituted variants, such as 2′-OMe, are included, as well as other modifications, including 2′-4′ bridged variants. Whenever reference is made to oligonucleotides, linkages between two mononucleotides may be phosphodiester linkages as well as modifications thereof, including, phosphonoacetate, phosphotriester, PS, phosphoro(di)thioate, MP, phosphoramidate linkers, phosphoryl guanidine, thiophosphoryl guanidine, sulfono phosphoramidate and the like.

[0086] The term ‘comprising’ encompasses ‘including’ as well as ‘consisting of’, e.g., a composition ‘comprising X’ may consist exclusively of X or may include something additional, e.g., X+Y. The term ‘about’ in relation to a numerical value x is optional and means, e.g., x±10%.

[0087] The word ‘substantially’ does not exclude ‘completely’, e.g., a composition which is ‘substantially free from Y’ may be completely free from Y. Where relevant, the word ‘substantially’ may be omitted from the definition.

[0088] The term ‘complementary’ as used herein refers to the fact that the EON hybridizes under physiological conditions to a second nucleic acid strand (for instance when the oligonucleotide as a first nucleic acid strand (=guide oligonucleotide) forms a heteroduplex RNA editing oligonucleotide complex, or HEON, with another complementary nucleic acid strand), or when it forms a double stranded complex with the target RNA sequence. The term does not necessarily mean that each nucleotide in a nucleic acid strand has a perfect pairing with its opposite nucleotide in the opposite sequence. In other words, while an EON may be complementary to a target sequence, there may be mismatches, wobbles and/or bulges between the oligonucleotide and the target sequence, while under physiological conditions that EON still hybridizes to the target sequence such that the cellular RNA editing enzymes can edit the target adenosine. The term ‘substantially complementary’ therefore also means that despite the presence of the mismatches, wobbles, and/or bulges, the EON has enough matching nucleotides between the EON and target sequence that under physiological conditions the EON hybridizes to the target RNA. As shown herein, an EON may be complementary, but may also comprise one or more mismatches, wobbles and/or bulges with the target sequence, if under physiological conditions the EON is able to hybridize to its target.

[0089] The term ‘downstream’ in relation to a nucleic acid sequence means further along the sequence in the 3′ direction; the term ‘upstream’ means the converse. Thus, in any sequence encoding a polypeptide, the start codon is upstream of the stop codon in the sense strand but is downstream of the stop codon in the antisense strand.

[0090] References to ‘hybridisation’ typically refer to specific hybridisation and exclude non-specific hybridisation. Specific hybridisation can occur under experimental conditions chosen, using techniques well known in the art, to ensure that most stable interactions between probe and target are where the probe and target have at least 70%, preferably at least 80%, more preferably at least 90% sequence identity.

[0091] The term ‘mismatch’ is used herein to refer to opposing nucleotides in a double stranded RNA complex which do not form perfect base pairs according to the Watson-Crick base pairing rules. In the historical sense, mismatched nucleotides are G-A, C-A, U-C, A-A, G-G, C-C, U-U pairs. In some aspects, an EON as disclosed herein comprises fewer than four mismatches with the target sequence, for example 0, 1 or 2 mismatches. ‘Wobble’ base pairs are G-U, I-U, I-A, and I-C base pairs. Although a G: G pairing would be considered a mismatch, that does not necessarily mean that the interaction is unstable, which means that the term ‘mismatch’ may be somewhat outdated based on the prior art and the current disclosure where a Hoogsteen base-pairing may be seen as a mismatch based on the origin of the nucleotide but still be relatively stable. An isolated G: G pairing in duplex RNA can for instance be quite stable, but still be defined as a mismatch.

[0092] The term ‘splice mutation’ relates to a mutation in a gene that encodes for a pre-mRNA, wherein the splicing machinery is dysfunctional in the sense that splicing of introns from exons is disturbed and due to the aberrant splicing, the subsequent translation is out of frame resulting in premature termination of the encoded protein. Often such shortened proteins are degraded rapidly and do not have any functional activity.

[0093] An EON (and the complementary nucleic acid strand when two oligonucleotides form a HEON) as disclosed herein may be chemically modified almost in its entirety, for example by providing nucleotides with a ribose sugar moiety carrying a 2′-OMe substitution, a 2′-F substitution, or a 2′-O-methoxyethyl(2′-MOE) substitution. The orphan nucleotide in the EON is preferably a cytidine or analog thereof (such as a nucleotide carrying a Benner's base), or a uridine or analog thereof (such as iso-uridine), and/or in one aspect comprises a diF modification at the 2′ position of the sugar, in another aspect comprises a deoxyribose (2′-H, DNA), and in yet a further aspect, at least one and in another embodiment both the two neighbouring nucleotides flanking the orphan nucleotide do not comprise a 2′-OMe modification. Complete modification wherein all nucleotides of the oligonucleotide hold a 2′-OMe modification, with natural bases, results in a non-functional oligonucleotide as far as RNA editing goes (known in the art), presumably because it hinders the ADAR activity at the targeted position. In general, an adenosine in a target RNA can be protected from editing by providing an opposing nucleotide with a 2′-OMe group (at least when there are no other chemical substitutions or modifications within the nucleotide), or by providing a guanine or adenine as opposing base, as these two nucleobases are also able to reduce editing of the opposing adenosine.

[0094] Various chemistries and modifications are known in the field of oligonucleotides that can be readily used in accordance with the disclosure. The regular internucleosidic linkages between the nucleotides may be altered by mono- or di-thioation of the phosphodiester bonds to yield PS esters or phosphorodithioate esters, respectively. Other modifications of the internucleosidic linkages are possible, including amidation and peptide linkers.

[0095] In one aspect, the EON as disclosed herein comprises 15, 16, 17, 18, 19, 20, 21, 22, 23, 24, 25, 26, 27, 28, 29, 30, 31, 32, 33, 34, 35, 36, 37, 38, 39, 40, 41, 42, 43, 44, 45, 46, 47, 48, 49, 50, 51, 52, 53, 54, 55, 56, 57, 58, 59, or 60 nucleotides.

[0096] It is known in the art that RNA editing entities (such as human ADAR enzymes) edit dsRNA structures with varying specificity, depending on several factors. One important factor is the degree of complementarity of the two strands making up the dsRNA sequence. Perfect complementarity of the two strands usually causes the catalytic domain of human ADAR to deaminate adenosines in a non-discriminative manner, reacting with any adenosine it encounters. The specificity of hADAR1 and 2 can be increased by introducing chemical modifications and/or ensuring several mismatches in the dsRNA, which presumably helps to position the dsRNA binding domains in a way that has not been clearly defined yet. Additionally, the deamination reaction itself can be enhanced by providing an oligonucleotide that comprises a mismatch opposite the adenosine to be edited. Following the instructions in the present disclosure, those of skill in the art will be capable of designing the complementary portion of the oligonucleotide according to their needs.

[0097] The RNA editing protein present in the cell that is of most interest to be used with an EON of the present disclosure is human ADAR1 and/or ADAR2. It will be understood by a person having ordinary skill in the art that the extent to which the editing entities inside the cell are redirected to other target sites may be regulated by varying the affinity of the EON for the recognition domain of the editing enzyme. The exact modification may be determined through some trial and error and/or through computational methods based on structural interactions between the EON and the recognition domain of the editing enzyme. In addition, or alternatively, the degree of recruiting and redirecting the editing enzyme resident in the cell may be regulated by the dosing and the dosing regimen of the EON. This is something to be determined by the experimenter (in vitro) or the clinician, usually in phase I and/or II clinical trials.

[0098] The disclosure provides the modification of target RNA sequences in eukaryotic, preferably metazoan, more preferably mammalian, most preferably human cells. The disclosure is particularly suitable for modifying RNA sequences in cells and tissues in which B4GALT1 is expressed and wherein that enzyme acts. B4GALT1 is an enzyme that plays a crucial role in the synthesis of complex carbohydrates called glycoconjugates. While it has been shown that a reduction in the enzymatic activity of B4GALT1 can have a protective effect against CVD, the exact mechanisms through which this occurs are not fully understood. B4GALT1 is involved in the construction of oligosaccharides with specific sequences and structures, particularly those that are part of peptidoglycans. These oligosaccharides are essential for the proper function and stability of proteins. A reduction in B4GALT1 activity can lead to a decrease in the level of complete oligosaccharides and downstream biological activity. One important class of oligosaccharides that B4GALT1 is involved in constructing is those terminated by sialyl groups, where sialylation relies on a preceding galactosylation step. Montasser et al. (2021, supra) found that a reduction in B4GALT1 activity is associated with decreased galactosylation and sialylation of apolipoprotein B100, fibrinogen, immunoglobulin G, and transferrin.

[0099] The target cell can be located in vitro, ex vivo or in vivo. One advantage of the material of the disclosure is that it can be used with cells in situ in a living organism, but it can also be used with cells in culture. In some aspects cells are treated ex vivo and are then introduced into a living organism (e.g., re-introduced into an organism from whom they were originally derived). The disclosure can also be used to edit target RNA sequences in cells from a transplant or within a so-called organoid, e.g., a liver tissue organoid or ‘spheroid’. Organoids can be thought of as three-dimensional in vitro-derived tissues but are driven using specific conditions to generate individual, isolated tissues. In a therapeutic setting they are useful because they can be derived in vitro from a patient's cells, and the organoids can then be re-introduced to the patient as autologous material which is less likely to be rejected than a normal transplant.

[0100] Without wishing to be bound by theory, the RNA editing through ADAR is thought to take place on primary transcripts in the nucleus, during transcription or splicing, or in the cytoplasm, where e.g., mature mRNA, miRNA or ncRNA can be edited.

[0101] It should be clear, that targeted editing according to the disclosure can be applied to any adenosine within the B4GALT1 transcript if the deamination of the adenosine results in a reduction of B4GALT1 function. As outlined herein, it is however preferred to target the adenosine at position 1055 in the wild-type B4GALT1 transcript product to yield a change from an AAU codon (encoding asparagine) to AIU (or AGU, encoding serine). Generally spoken, RNA editing may be used to create RNA sequences with different properties. Such properties may be coding properties (creating proteins with different sequences or length, leading to altered protein properties or functions), or binding properties (causing inhibition or over-expression of the RNA itself or a target or binding partner; entire expression pathways may be altered by recoding miRNAs or their cognate sequences on target RNAs). Protein function or localization may be changed at will, by functional domains or recognition motifs, including but not limited to signal sequences, targeting or localization signals, recognition sites for proteolytic cleavage or co- or post-translational modification, catalytic sites of enzymes, binding sites for binding partners, signals for degradation or activation and so on. As disclosed herein, an EON as disclosed herein may also cause splice effects, such as exon skipping (e.g., skipping of exon 5), which is not necessarily a bad thing, because the resulting mRNA may encode an inactive B4GALT1 protein, in a transient manner (because the original DNA encoding the protein remains untouched). These and other forms of RNA and protein “engineering”, whether to prevent, delay or treat disease or for any other purpose, in medicine or biotechnology, as diagnostic, prophylactic, therapeutic, research tool or otherwise, are encompassed by the present disclosure. Hence, any RNA editing of a target adenosine in the B4GALT1 transcript and that results in reduction of B4GALT1 turnover rate is encompassed by what is disclosed herein.

[0102] The present disclosure relates to a whole new field of treating CVD using genetic editing techniques. The genetic editing technique is not particularly limited. Suitable techniques include known gene therapy techniques, which include DNA editing techniques such as CRISPR/Cas, ZFNs, TALENs, and meganucleases, and preferably RNA editing techniques such as ADAR-mediated editing techniques, as further outlined in detail herein.

[0103] The amount of EON to be administered, the dosage and the dosing regimen can vary from cell type to cell type, the disease to be treated, the target population, the mode of administration (e.g., systemic versus local), the severity of disease and the acceptable level of side activity, but these can and should be assessed by trial and error during in vitro research, in pre-clinical and clinical trials. The trials are particularly straightforward when the modified sequence leads to an easily detected phenotypic change, or a change in (the level of, or activity of) a specified biomarker. It is possible that higher doses of EONs could compete for binding to an ADAR within a cell, thereby depleting the amount of the entity, which is free to take part in RNA editing, but routine dosing trials will reveal any such effects for a given EON and a given target.

[0104] One suitable trial technique involves delivering the EON to cell lines, or a test organism and then taking biopsy samples at various time points thereafter. The sequence of the target RNA can be assessed in the biopsy sample and the proportion of cells having the modification can easily be followed. After this trial has been performed once then the knowledge can be retained, and future delivery can be performed without needing to take biopsy samples. A method as disclosed herein can thus include a step of identifying the presence of the desired change in the cell's target RNA sequence, thereby verifying that the target RNA sequence has been modified. This step will typically involve sequencing of the relevant part of the target RNA, or a cDNA copy thereof (or a cDNA copy of a splicing product thereof, in case the target RNA is a pre-mRNA), as discussed above, and the sequence change can thus be easily verified. Alternatively, the change may be assessed on the function of the protein, for instance by measuring the reduction rate of UDP-Gal, or assessing glycosylation levels of transferrin in serum, before and after treatment, or any other potential marker, which measurements are preferably performed in vitro on samples obtained from the treated subject.

[0105] After RNA editing has occurred in a cell, the modified RNA can become diluted over time, for example due to cell division, limited half-life of the edited RNAs, etc. Thus, in practical therapeutic terms a method as disclosed herein may involve repeated delivery of an EON until enough target RNAs have been modified to provide a tangible benefit to the patient and/or to maintain the benefits over time.

[0106] EONs as disclosed herein are particularly suitable for therapeutic use, and so the disclosure also relates to a pharmaceutical composition comprising an EON as disclosed herein, or a vector or plasmid encoding the EON as disclosed herein, and a pharmaceutically acceptable carrier. In some aspects, the pharmaceutically acceptable carrier can simply be a saline solution. This can usefully be isotonic or hypotonic, particularly for pulmonary delivery. The disclosure also provides a delivery device (e.g., syringe, inhaler, nebuliser) which includes a pharmaceutical composition as disclosed herein.

[0107] The disclosure also provides an EON as disclosed herein for use in the treatment of CVD. This treatment can be achieved through making a change in a target B4GALT1 RNA sequence in a mammalian, such as a human liver cell, preferably a hepatocyte, because expression of B4GALT1 is high in liver, although it is found to be ubiquitously expressed throughout the human body. Similarly, the disclosure provides the use of an EON as disclosed herein in the manufacture of a medicament for making a change in a target B4GALT1 RNA sequence in a mammalian, preferably a human liver cell, more preferably a hepatocyte, as described herein, and thereby treating, preventing, or ameliorating CVD.

[0108] The disclosure also provides a method for the deamination of at least one specific target adenosine present in a target B4GALT1 RNA sequence in a cell, the method comprising the steps of: providing the cell with an EON as disclosed herein (either naked, or through vector delivery); allowing uptake by the cell of the EON (or the vector); allowing annealing of the EON to the target RNA molecule; allowing an endogenous mammalian ADAR enzyme to deaminate the target adenosine in the target RNA molecule (preferably the adenosine at position 1055 in the B4GALT1 transcript product) to an inosine; and optionally identifying the presence of the inosine in the RNA sequence.

[0109] The term CVD, includes conditions such as CAD, sometimes known as coronary heart disease, strokes and transient ischaemic attack (TIA; or mini stroke), peripheral arterial disease, and/or aortic disease. The EONs as disclosed herein may be used in the treatment, prevention, or amelioration of any or all these conditions. In a preferred embodiment, the CVD for treatment according to the disclosure is CAD.

[0110] The methods as disclosed herein can be applied to subjects where the target is an adenosine. For instance, where the target adenosine is at position 1055 of the B4GALT1 transcript, treatment will generally not be performed on a patient identified as already having, or having a likelihood of having, the c. 1055A>G variant.

[0111] The present disclosure also provides a method for the deamination of at least one specific target adenosine present in a target B4GALT1 RNA sequence in a cell, the method comprising the steps of: providing the cell with a vector or plasmid encoding the EON as disclosed herein; allowing uptake by the cell of the vector or plasmid; allowing annealing of the EON to the target RNA molecule; allowing an endogenous mammalian ADAR enzyme to deaminate the target adenosine in the target RNA molecule (preferably the adenosine at position 1055 in the B4GALT1 transcript product) to an inosine; and optionally identifying the presence of the inosine in the RNA sequence.

[0112] In a preferred aspect, depending on the ultimate effect of A to I conversion, the identification step comprises the following steps: sequencing the target RNA; sequencing cDNA derived from the target RNA; assessing the presence or absence of an A to G conversion in target RNA derived cDNA; assessing the presence or absence of a functional protein; assessing whether splicing of the pre-mRNA was altered by the deamination; or using a functional read-out, where the target RNA after the deamination should encode an enzyme with a reduced enzymatic turnover rate. Examples include assessing the reduction rate of UDP-Gal and/or assessing biomarkers in serum and/or plasma. For instance, a reduction in B4GALT1 enzymatic turnover can be detected through a reduction in fibrinogen in plasma, a decrease of LDL-C in serum, or through a decrease in serum of tetrasialylated transferrin levels with a corresponding increase in lower sialylation levels (such as an increase in trisialylated transferrin levels).

[0113] A very suitable manner to identify the presence of an inosine after deamination of the target adenosine is of course dPCR or even sequencing, using methods that are well-known to the person skilled in the art, and as outlined herein. However, the person skilled in the art of liver disease may apply tests to monitor certain biomarkers related to LDL-C and or fibrinogen levels, as discussed above.

[0114] Suitable functional assays to test for a reduction in B4GALT1 turnover are described in detail in Montasser et al. (2021, supra). In brief, one in vivo test is the carbohydrate-deficient transferrin (CDT) test. The CDT test is used clinically to diagnose patients with congenital glycosylation disorders. The CDT test assesses the level of sialylation of the protein transferrin. Under normal conditions, transferrin is mostly tetrasialylated. As B4GALT1 activity drops, the level of tetrasialylated transferrin drops and, correspondingly, the levels of lesser sialylated transferrin (such as trisialylated transferrin) increase. This test can be used to assay the effectiveness of EONs in an in vivo setting, analysing the combined effect of any reduction in B4GALT1 turnover rate along with the effect of the percentage of B4GALT1 that is the variant versus the wild type. A further test is to assess the reduction rate of UDP-Gal in a biochemical assay. Any acceptor can be used for this assay, though a convenient acceptor is the monosaccharide N-acetylglucosamine (NGlcNAc). Standard assay conditions are set out in Montasser et al. (2021, supra). This assay can find utility in examining kinetic parameters of a pure B4GALT1 mutant, or of cellular isolates after EON-mediated ADAR editing. A further test is to knock-in a B4GALT1 enzyme or variant, for example into a mouse model, and assess serum and/or plasma concentrations of biomarkers for B4GALT1 activity, such as LDL-C and/or fibrinogen.

[0115] The EON as disclosed herein is suitably administrated in aqueous solution, e.g. saline, or in suspension, optionally comprising additives, excipients and other ingredients, compatible with pharmaceutical use, at concentrations ranging from 1 ng/ml to 1 g/ml, preferably from 10 ng/ml to 500 mg/ml, more preferably from 100 ng/ml to 100 mg/ml. Dosage may suitably range from between about 1 μg/kg to about 100 mg/kg, preferably from about 10 μg/kg to about 10 mg/kg, more preferably from about 100 μg/kg to about 1 mg/kg. Administration may be by inhalation (e.g., through nebulization), intranasally, orally, by injection or infusion, intravenously, subcutaneously, intradermally, intramuscularly, intra-tracheally, intra-peritoneally, intrarectally, intrathecally, intra-cisterna magna, parenterally, and the like. Administration may be in solid form, in the form of a powder, a pill, a gel, a solution, a slow-release formulation, or in any other form compatible with pharmaceutical use in humans.

[0116] In one aspect, a method as disclosed herein comprises the steps of administering to the subject an EON or pharmaceutical composition as disclosed herein, allowing the formation of a double stranded nucleic acid complex of the EON with its specific complementary target nucleic acid molecule in a cell in the subject; allowing the engagement of an endogenous present adenosine deaminating enzyme, such as ADAR1 and/or ADAR2; and allowing the enzyme to deaminate the target adenosine in the target nucleic target molecule to an inosine, thereby alleviating, preventing or ameliorating CVD.

[0117] RNA editing molecules present in the cell will usually be proteinaceous in nature, such as the ADAR enzymes found in metazoans, including mammals. Preferably, the cellular editing entity is an enzyme, more preferably an adenosine deaminase or a cytidine deaminase, still more preferably an adenosine deaminase. These are enzymes with ADAR activity. The ones of most interest are the human ADARs, hADAR1 and hADAR2, including any isoforms thereof. RNA editing enzymes known in the art, for which oligonucleotide constructs as disclosed herein may conveniently be designed, include the adenosine deaminases acting on RNA (ADARs), such as hADAR1 and hADAR2 in humans or human cells and cytidine deaminases. It is known that hADAR1 exists in two isoforms; a long 150 kDa interferon inducible version and a shorter, 110 kDa version, that is produced through alternative splicing from a common pre-mRNA. Consequently, the level of the 150 kDa isoform available in the cell may be influenced by interferon, particularly interferon-gamma (IFN-γ). hADAR1 is also inducible by TNF-α. This provides an opportunity to develop combination therapy, whereby IFN-γ or TNF-α and EONs as disclosed herein are administered to a patient either as a combination product, or as separate products, either simultaneously or subsequently, in any order. Certain disease conditions may already coincide with increased IFN-γ or TNF-α levels in certain tissues of a patient, creating further opportunities to make editing more specific for diseased tissues. It will be understood by a person having ordinary skill in the art that the extent to which the editing entities inside the cell are redirected to other target sites may be regulated by varying the affinity of the first nucleic acid strand for the recognition domain of the editing molecule.

### Chemical Modifications

[0118] All chemical modifications listed below that may be used in the EON as disclosed herein may also be used for a sense strand that is complementary to the EON, when the EON and the complementary strand form a so-called heteroduplex RNA editing oligonucleotide (HEON) complex, as described in PCT/EP2023/079290 (unpublished), except that the opposite sense strand does not have an orphan nucleotide. Hence, the modification related to the orphan nucleotide relate only to the EON as disclosed herein, but all other modifications relate to the EON as disclosed herein and any (protecting) sense oligonucleotide that may be used together with the EON in a pharmaceutical product. This includes the use of hydrophobic moieties (such as tocopherol and cholesterol) and cell-specific ligands (such as GalNAc moieties), that have also been described herein, and in detail in PCT/EP2023/079290 (unpublished), which may either be bound to the EON or its opposite strand, or both.

[0119] The internucleoside linkages in the oligonucleotides as disclosed herein may comprise one or more naturally occurring internucleoside linkages and/or modified internucleoside linkages. Without limitations, at least one, at least two, or at least three internucleoside linkages from a 5′ and/or 3′ end of the EON is preferably a modified internucleoside linkage. A preferred modified internucleoside linkage is a PS linkage. In one aspect, all internucleoside linkages of the EON are modified internucleoside linkages. In one aspect, the EON comprises a PNdmi linkage linking the most terminal nucleoside at the 5′ and/or 3′ end, and the one before last nucleoside at each of these ends, respectively. A PNdmi linkage as preferably used in the EONs as disclosed herein has the structure of the following formula (I):

[chemical structure]

[0120] A common limiting factor in oligonucleotide-based therapies are the oligonucleotide's ability to be taken up by the cell (when delivered per se, or ‘naked’ without applying a delivery vehicle), its biodistribution and its resistance to nuclease-mediated breakdown. The skilled person is aware, and it has been described in detail in the art, that a variety of chemical modifications can assist in overcoming such limitations. Examples of such now commonly used chemical modifications are the 2′-O-methyl (often abbreviated to 2′-OMe or 2′-O-Me), 2′-F and 2′-O-methoxyethyl (often also referred to as 2′-methoxyethoxy, or 2′-MOE) modifications of the sugar and the use of PS linkages between nucleosides. WO2020/201406 discloses the use of MP linkage modifications at certain positions surrounding the orphan nucleotide in the first nucleic acid strand. The ribose 2′ groups in all nucleotides of the EON, except for the ribose sugar moiety of the orphan nucleotide that has certain limitations in respect of compatibility with RNA editing, can be independently selected from 2′-H (i.e., DNA), 2′-OH (i.e., RNA), 2′-OMe, 2′-MOE, 2′-F, or 2′-4′-linked (for instance a locked nucleic acid (LNA)), or other ribosyl 1′-substitutions, 2′ substitutions, 3′ substitutions, 4′ substitutions or 5′ substitutions. The orphan nucleotide in the EON that comprises no other chemical modifications to the ribose sugar, the base, or the linkage preferably does not carry a 2′-OMe or 2′-MOE substitution but may carry a 2′-F, a 2′,2′-difluoro (diF), or 2′-ara-F (FANA) substitution or may be DNA. PCT/EP2023/069609 (unpublished) describes the modification of the 2′ position of the ribose sugar moiety of the orphan nucleotide by a 2′,2′-disubstituted substitution such as diF, which is also applicable. The 2′-4′ linkage can be selected from many linkers known in the art, such as a methylene linker, amide linker, or constrained ethyl linker (cEt).

[0121] The disclosure provides an EON for use in the deamination of a target nucleotide (preferably adenosine) in a target RNA, wherein the EON is complementary to a stretch of nucleotides in the target RNA that includes the target adenosine, wherein the nucleotide in the first nucleic acid strand that is directly opposite the target nucleotide is the orphan nucleotide, and when the target nucleotide is an adenosine the orphan nucleotide comprises preferably a base or modified base or base analogue with a NH moiety at the position similar to the ring nitrogen (e.g., Benner's base Z). The nucleotide numbering in the EON is such that the orphan nucleotide is number 0 and the nucleotide 5′ from the orphan nucleotide is number +1. Counting is further positively (+) incremented towards the 5′ end and negatively (−) incremented towards the 3′ end, wherein the first nucleotide 3′ from the orphan nucleotide is number −1. The internucleoside linkage numbering in the EON is such that linkage number 0 is the linkage 5′ from the orphan nucleotide, and the linkage positions in the oligonucleotide are positively (+) incremented towards the 5′ end and negatively (−) incremented towards the 3′ end.

[0122] Preferably, the EON comprises one or more (chirally pure or chirally mixed) PS linkages. In one aspect, the PS linkages connect the terminal 3, 4, 5, 6, 7, or 8 nucleotides on each end of the first nucleic acid strand. In one aspect, the EON comprises one of more phosphoramidate (PN) linkages. In one aspect, a PN linkage connects the terminal two nucleotides on each end of the EON as disclosed herein.

[0123] A nucleoside in the EON may be a natural nucleoside (deoxyribonucleoside or ribonucleoside) or a non-natural nucleoside. It is noted that for RNA editing, in which double-stranded RNA is generally the substrate for enzymes with deamination activity (such as ADARs), ribonucleosides are considered ‘natural’, while deoxyribonucleosides may then be, for the sake of argument, considered as non-natural, or modified, simply because DNA is not present in the RNA-RNA double stranded substrate configurations. The skilled person appreciates that when the nucleotide has a natural ribose moiety, it may still be non-naturally modified in the base and/or the linkage.

[0124] In addition to the specific preferred chemical modifications at certain positions in compounds as disclosed herein, compounds as disclosed herein may comprise one or more (additional) modifications to the nucleobase, scaffold and/or backbone linkage, which may or may not be present in the same monomer, for instance at the 3′ and/or 5′ position. A scaffold modification indicates the presence of a modified version of the ribosyl moiety as naturally occurring in RNA (i.e., the pentose moiety), such as bicyclic sugars, tetrahydropyrans, hexoses, morpholinos, 2′-modified sugars, 4′-modified sugar, 5′-modified sugars and 4′-substituted sugars. Examples of suitable modifications include, but are not limited to 2′-O-modified RNA monomers, such as 2′-O-alkyl or 2′-O-(substituted)alkyl such as 2′-OMe, 2′-O-(2-cyanoethyl), 2′-MOE, 2′-O-(2-thiomethyl)ethyl, 2′-O-butyryl, 2′-O-propargyl, 2′-O-allyl, 2′-O-(2-aminopropyl), 2′-O-(2-(dimethylamino) propyl), 2′-O-(2-amino)ethyl, 2′-O-(2-(dimethylamino)ethyl); 2′-deoxy (DNA); 2′-O-(haloalkyl)methyl such as 2′-O-(2-chloroethoxy)methyl (MCEM), 2′-O-(2,2-dichloroethoxy)methyl (DCEM); 2′-O-alkoxycarbonyl such as 2′-O-[2-(methoxycarbonyl)ethyl] (MOCE), 2′-O-[2-N-methylcarbamoyl)ethyl] (MCE), 2′-O-[2-(N,N-dimethylcarbamoyl)ethyl] (DCME); 2′-halo e.g. 2′-F, FANA; 2′-O-[2-(methylamino)-2-oxoethyl] (NMA); a bicyclic or bridged nucleic acid (BNA) scaffold modification such as a conformationally restricted nucleotide (CRN) monomer, a locked nucleic acid (LNA) monomer, a xylo-LNA monomer, an α-LNA monomer, an α-I-LNA monomer, a β-d-LNA monomer, a 2′-amino-LNA monomer, a 2′-(alkylamino)-LNA monomer, a 2′-(acylamino)-LNA monomer, a 2′-N-substituted 2′-amino-LNA monomer, a 2′-thio-LNA monomer, a (2′-0,4′-C) constrained ethyl (cEt) BNA monomer, a (2′-0,4′-C) constrained methoxyethyl (cMOE) BNA monomer, a 2′,4′-BNA^{NC}(NH) monomer, a 2′,4′-BNA^{NC}(NMe) monomer, a 2′,4′-BNA^{NC}(NBn) monomer, an ethylene-bridged nucleic acid (ENA) monomer, a carba-LNA (cLNA) monomer, a 3,4-dihydro-2H-pyran nucleic acid (DpNA) monomer, a 2′-C-bridged bicyclic nucleotide (CBBN) monomer, an oxo-CBBN monomer, a heterocyclic-bridged BNA monomer (such as triazolyl or tetrazolyl-linked), an amido-bridged BNA monomer (such as AmNA), an urea-bridged BNA monomer, a sulfonamide-bridged BNA monomer, a bicyclic carbocyclic nucleotide monomer, a TriNA monomer, an α-I-TriNA monomer, a bicyclo DNA (bcDNA) monomer, an F-bcDNA monomer, a tricyclo DNA (tcDNA) monomer, an F-tcDNA monomer, an alpha anomeric bicyclo DNA (abcDNA) monomer, an oxetane nucleotide monomer, a locked PMO monomer derived from 2′-amino LNA, a guanidine-bridged nucleic acid (GuNA) monomer, a spirocyclopropylene-bridged nucleic acid (scpBNA) monomer, and derivatives thereof; cyclohexenyl nucleic acid (CeNA) monomer, altriol nucleic acid (ANA) monomer, hexitol nucleic acid (HNA) monomer, fluorinated HNA (F-HNA) monomer, pyranosyl-RNA (p-RNA) monomer, 3′-deoxypyranosyl DNA (p-DNA), unlocked nucleic acid UNA); an inverted version of any of the monomers above. All these modifications are known to the person skilled in the art.

[0125] The base sequence of the EON disclosed herein is complementary to part of the base sequence of a target B4GALT1 transcription product that includes at least a target adenosine (preferably the adenosine at position 1055) that is to be deaminated to an inosine, and therefore can anneal (or hybridize) to the target transcription product. The complementarity of a base sequence can be determined by using a BLAST program or the like. Those skilled in the art can easily determine the conditions (temperature, salt concentration, and the like) under which two strands can be hybridized, taking into consideration the complementarity between the strands.

[0126] The EON as disclosed herein, in contrast to what has been described for gapmers and their relation towards RNase breakdown and the use of such gapmers in double-stranded complexes (see for instance EP 3954395 A1), does not comprise a stretch of DNA nucleotides which would make a target sequence (or a sense nucleic acid strand) a target for RNase-mediated breakdown. In one aspect, the EON as disclosed herein does not comprise four or more consecutive DNA nucleotides anywhere within its sequence. In one aspect, the EON as disclosed herein is composed of as much (chemically) modified nucleotides as possible to enhance the resistance towards RNase-mediated breakdown, while at the same time being as efficient as possible in producing an RNA editing effect. This means that the orphan nucleotide and several other nucleotides within the EON may be DNA, but also that there is no stretch of four or more consecutive DNA nucleotides within the EON. Hence, the EON as disclosed herein is not a gapmer. A gapmer is in principle a single-stranded nucleic acid consisting of a central region (DNA gap region with at least four consecutive deoxyribonucleotides) and wing regions positioned directly at the 5′ end (5′ wing region) and the 3′ end (3′ wing region) thereof. In contrast, the EON as disclosed herein may be any oligonucleotide that produces, causes, triggers, allows an RNA editing effect in which a target adenosine in a target RNA molecule is deaminated to an inosine, and accordingly is resistant to RNase-mediated breakdown as much as possible to yield this effect.

[0127] In one aspect, the EON as disclosed herein, or the sense strand to which it may be annealed before entering a target cell, is bound to a hydrophobic moiety, such as palmityl or an analog thereof, cholesterol or analog thereof, or tocopherol or analog thereof. It is preferably bound to the 5′ terminus. In case a hydrophobic moiety is bound to the 5′ terminus as well as to the 3′ terminus, such hydrophobic moieties may the same or different. The hydrophobic moiety bound to the oligonucleotide may be bound directly, or indirectly mediated by another substance. When the hydrophobic moiety is bound directly, it is sufficient if the moiety is bound via a covalent bond, an ionic bond, a hydrogen bond, or the like. When the hydrophobic moiety is bound indirectly, it may be bound via a linking group (a linker). The linker may be a cleavable or an uncleavable linker. A cleavable linker refers to a linker that can be cleaved under physiological conditions, for example, in a cell or an animal body (e.g., a human body). A cleavable linker is selectively cleaved by an endogenous enzyme such as a nuclease, or by physiological circumstances specific to parts of the body or cell, such as pH or reducing environment (such as glutathione concentrations). Examples of a cleavable linker comprise, but is not limited to, an amide, an ester, one or both esters of a phosphodiester, a phosphoester, a carbamate, and a disulfide bond, as well as a natural DNA linker. Cleavable linkers also include self-immolative linkers. An uncleavable linker refers to a linker that is not cleaved under physiological conditions, or very slowly compared to a cleavable linker, for example, in a PS linkage, modified or unmodified deoxyribonucleosides linked by a PS linkage, a spacer connected through a PS bond and a linker consisting of modified or unmodified ribonucleosides. There is no restriction on the chain length, when a linker is a nucleic acid such as DNA, or an oligonucleotide. However, it may be usually from 2 to 20 bases in length, from 3 to 10 bases in length, or from 4 to 6 bases in length. There is no restriction on the length or composition of a spacer that is connects the ligand and the oligonucleotide, and may include for example ethylene glycol, TEG, HEG, alkyl chains, propyl, 6-aminohexyl, or dodecyl.

[0128] The disclosure also provides a pharmaceutical composition comprising the EON as disclosed herein, and further comprising a pharmaceutically acceptable carrier and/or other additive and may be dissolved in a pharmaceutically acceptable organic solvent, or the like. Dosage forms in which the EON or the pharmaceutical composition are administered may depend on the disorder to be treated and the tissue that needs to be targeted and can be selected according to common procedures in the art. The pharmaceutical compositions may be administered by a single-dose administration or by multiple dose administration. It may be administered daily or at appropriate time intervals, which may be determined using common general knowledge in the field and may be adjusted based on the disorder and the efficacy of the active ingredient.

[0129] In one aspect, the EON as disclosed herein comprises at least one nucleotide with a sugar moiety that comprises a 2′-OMe modification. In one aspect, the EON as disclosed herein comprises at least one nucleotide with a sugar moiety that comprises a 2′-MOE modification. In one aspect, the EON as disclosed herein comprises at least one nucleotide with a sugar moiety that comprises a 2′-F modification. In one aspect, the orphan nucleotide carries a 2′-H in the sugar moiety and is therefore referred to as a DNA nucleotide, even though additional modifications may exist in its base and/or linkage to its neighbouring nucleosides. In one aspect, the orphan nucleotide carries a 2′-F in the sugar moiety. In one aspect, the orphan nucleotide carries a diF substitution in the sugar moiety. In one aspect, the orphan nucleotide carries a 2′-F and a 2′-C-methyl in the sugar moiety. In one aspect, the orphan nucleotide comprises a 2′-F in the arabinose configuration (FANA) in the sugar moiety. In one aspect, the EON is an antisense oligonucleotide that can form a double stranded nucleic acid complex with a target RNA molecule, wherein the double stranded nucleic acid complex can recruit an adenosine deaminating enzyme for deamination of a target adenosine in the target B4GALT1 RNA molecule, wherein the nucleotide in the EON that is opposite the target adenosine is the orphan nucleotide, and wherein the orphan nucleotide has the following formula (II):

[chemical structure]

wherein: X is O, NH, OCH₂, CH₂, Se, or S; B is a nitrogenous base selected from the group consisting of: cytosine, uracil, isouracil, N3-glycosylated uracil, pseudoisocytosine, 8-oxo-adenine, and 6-amino-5-nitro-3-yl-2 (1H)-pyridone; R₁ and R₂ are both selected, independently, from H, OH, F or CH₃; R₃ is the part of the EON that is 5′ of the orphan nucleotide, consisting of 7 to 30 nucleotides; and R₄ is the part of the EON that is 3′ of the orphan nucleotide, consisting of 4 to 25 nucleotides. The nucleotide 3′ and/or 5′ from the orphan nucleotide may be DNA, more preferably the nucleotide at the 3′ (position-1).

[0130] In one aspect, the EON as disclosed herein comprises at least one MP internucleoside linkage according to the following formula (III):

[chemical structure]

[0131] A preferred position for an MP linkage in an EON as disclosed herein is linkage-2, thereby connecting the nucleoside at position-1 with the nucleoside at position-2, although other positions for MP linkages are not explicitly excluded.

[0132] An EON as disclosed herein may also comprise one or more linkage modifications according to the structure of the following formula (IV):

[chemical structure]

[0133] wherein:
[0134] X=O or S; and
[0135] R=an aryl, a substituted aryl, a heterocycle, a substituted heterocycle, an aromatic heterocycle, a substituted aromatic heterocycle, a C₁-C₆ alkoxy, a substituted C₁-C₆ alkoxy, a C₁-C₂₀ alkyl, a substituted C₁-C₂₀ alkyl, a C₁-C₆ alkenyl, a C₁-C₆ substituted alkenyl, a C₁-C₆ alkynyl, a substituted C₁-C₆ alkynyl, or a conjugate group. In a preferred embodiment, X=O and R=methyl and the linkage modification is referred to as mesyl phosphoramidate, MsPA or PNms. In a preferred aspect, the PN mesyl (or PNms) linkage is at linkage position-2 in the EON as disclosed herein (where it is then present instead of a PS, PO, or MP linkage), such as in EON B4GALT1-65 (SEQ ID NO: 1079).

[0136] In a preferred aspect, the EON as disclosed herein comprises an internucleoside linkage of the structure of formula (IV), wherein X=O and R=CH₃, which linkage is generally referred to herein as a PNms linkage (mesyl phosphoramidate). In other preferred aspects, R equals one of the following structures (a), (b), (c), (d), (e), (f), (g), (h), or (i):

[chemical structure]

[0137] Disclosed herein is also an EON that is able to mediate adenosine deamination by recruitment of a deaminating enzyme in a cell after the EON has formed a double-stranded complex with a region of a target RNA nucleic acid molecule in a cell, wherein the region comprises a target adenosine, wherein the deaminating enzyme can deaminate the target adenosine into an inosine, and wherein the EON comprises a moiety with a structure according to formula (V):

[chemical structure]

[0138] wherein: X=O or S;
[0139] Y=O⁻ or S⁻; and
[0140] R=an aryl, a substituted aryl, a heterocycle, a substituted heterocycle, an aromatic heterocycle, a substituted aromatic heterocycle, a C₁-C₆ alkoxy, a substituted C₁-C₆ alkoxy, a C₁-C₂₀ alkyl, a substituted C₁-C₂₀ alkyl, a C₁-C₆ alkenyl, a C₁-C₆ substituted alkenyl, a C₁-C₆ alkynyl, a substituted C₁-C₆ alkynyl, or a conjugate group. In a preferred embodiment, X=O and R=methyl.

[0141] An EON as disclosed herein may comprise a substitution of one of the non-bridging oxygens in the phosphodiester linkage. This modification slightly destabilizes base pairing but adds significant resistance to nuclease degradation. A preferred nucleotide analogue or equivalent comprises PS, phosphonoacetate, phosphorodithioate, phosphotriester, aminoalkylphosphotriester, H-phosphonate, methyl and other alkyl phosphonate including 3′-alkylene phosphonate, 5′-alkylene phosphonate and chiral phosphonate, phosphinate, phosphoramidate including 3′-amino phosphoramidate and aminoalkylphosphoramidate, thionophosphoramidate, thionoalkylphosphonate, thionoalkylphosphotriester, selenophosphate or boranophosphate. Particularly preferred are internucleoside linkages that are modified to contain a PS. Particularly preferred are internucleoside linkages that are modified to contain an MP. Particularly preferred are internucleoside linkages that are modified to contain a PNms. Particularly preferred are internucleoside linkages that are modified to contain a PNdmi. The regular internucleosidic linkages between the nucleotides may be altered by mono- or di-thioation of the phosphodiester bonds to yield PS esters or phosphorodithioate esters, respectively. Other modifications of the internucleosidic linkages are possible, including amidation and peptide linkers. The skilled person can determine for what target RNA nucleic acid molecule the EON comprises a certain linkage modification at each linkage position of the EON as disclosed herein to generate the most effective and most stable oligonucleotide compound.

[0142] In one aspect, the EON as disclosed herein comprises at least one nucleotide with a sugar moiety that comprises a 2′-fluoro (2′-F) modification. A preferred position for the nucleotide that carries a 2′-F modification is position-3 in the EON, which may be present together with an identical 2′ modification in the orphan nucleotide as discussed above.

[0143] In one aspect, the EON as disclosed herein comprises at least one phosphonoacetate or phosphonoacetamide internucleoside linkage.

[0144] In one aspect, the EON as disclosed herein comprises at least one nucleotide comprising an LNA ribose modification, or a UNA ribose modification. In one aspect, the EON as disclosed herein comprises at least one nucleotide comprising a TNA ribose modification.

[0145] The skilled person knows that an oligonucleotide, such as an EON as outlined herein, generally consists of repeating monomers. Such a monomer is most often a nucleotide or a chemically modified nucleotide. The most common naturally occurring nucleotides in RNA are adenosine monophosphate (A), cytidine monophosphate (C), guanosine monophosphate (G), and uridine monophosphate (U). These consist of a pentose sugar, a ribose, a 5′-linked phosphate group which is linked via a phosphate ester, and a 1′-linked base. The sugar connects the base and the phosphate and is therefore often referred to as the “scaffold” of the nucleotide.

[0146] A modification in the pentose sugar is therefore often referred to as a ‘scaffold modification’. The original pentose sugar may be replaced in its entirety by another moiety that similarly connects the base and the phosphate. It is therefore understood that while a pentose sugar is often a scaffold, a scaffold is not necessarily a pentose sugar. Examples of scaffold modifications that may be applied in the monomers of the EON as disclosed herein are disclosed in WO2020/154342, WO2020/154343, and WO2020/154344.

[0147] In one aspect, the EON as disclosed herein may comprise one or more nucleotides carrying a 2′-MOE ribose modification. Also, in one aspect, the EON as disclosed herein comprises one or more nucleotides not carrying a 2′-MOE ribose modification, and wherein the 2′-MOE ribose modifications are at positions that do not prevent the enzyme with adenosine deaminase activity from deaminating the target adenosine. In another aspect, the EON as disclosed herein comprises 2′-OMe ribose modifications at the positions that do not comprise a 2′-MOE ribose modification, and/or wherein the EON comprises deoxynucleotides at positions that do not comprise a 2′-MOE ribose modification. In one aspect the EON as disclosed herein comprises one or more nucleotides comprising a 2′ position comprising a 2′-MOE, 2′-OMe, 2′-OH, 2′-deoxy, TNA, 2′-fluoro (2′-F), a 2′,2′-disubstituted modification (such as a 2′,2′-difluoro (diF) modification, a 2′-fluoro-2′-C-methyl modification, or others such as those indicated in e.g., Grosse et al. (2022. ACS Med Chem Lett DOI: 10.1021/acsmedchemlett.2c00372) including 2′-spirocyclic ones) or a 2′-4′-linkage (i.e., a bridged nucleic acid such as a LNA or examples mentioned in e.g., WO2018/007475)). In another aspect, other nucleic acid monomer that are applied are arabinonucleic acids and 2′-deoxy-2′-fluoroarabinonucleic acid (FANA), for instance for improved affinity purposes. The 2′-4′ linkage can be selected from linkers known in the art, such as a methylene linker or constrained ethyl linker. A wide variety of 2′ modifications are known in the art. Further examples are disclosed in further detail in WO2016/097212, WO2017/220751, WO2018/041973, WO2018/134301, WO2019/219581, WO2019/158475, and WO2022/099159 for instance. In all cases, the modifications should be compatible with editing such that the EON fulfils its role as an editing triggering oligonucleotide that can form a double stranded complex with the target RNA and recruit a deaminating enzyme, which enzyme can subsequently deaminate the target adenosine. Where a monomer comprises a UNA ribose modification, that monomer can have a 2′ position comprising the same modifications discussed above, such as a 2′-MOE, a 2′-OMe, a 2′-OH, a 2′-deoxy, a 2′-F, a 2′,2′-diF, a 2′-fluoro-2′-C-methyl, an arabinonucleic acid, a FANA, or a 2′-4′-linkage (i.e., a bridged nucleic acids such as an LNA).

[0148] A base, sometimes called a nucleobase, is generally adenine, cytosine, guanine, thymine or uracil, or a derivative thereof. A base, sometimes called a nucleobase, is defined as a moiety that can bond to another nucleobase through H-bonds, polarized bonds (such as through CF moieties) or aromatic electronic interactions. Cytosine, thymine, and uracil are pyrimidine bases, and are generally linked to the scaffold through their 1-nitrogen. Adenine and guanine are purine bases and are generally linked to the scaffold through their 9-nitrogen. The terms ‘adenine’, ‘guanine’, ‘cytosine’, ‘thymine’, ‘uracil’ and ‘hypoxanthine’ as used herein refer to the nucleobases as such. The terms ‘adenosine’, ‘guanosine’, ‘cytidine’, ‘thymidine’, ‘uridine’ and ‘inosine’ refer to the nucleobases linked to the (deoxy) ribosyl sugar.

[0149] The nucleobases in an EON as disclosed herein can be adenine, cytosine, guanine, thymine, inosine, or uracil or any other moiety able to interact with another nucleobase through H-bonds, polarized bonds (such as CF) or aromatic electronic interactions. The nucleobases at any position in the nucleic acid strand can be a modified form of adenine, cytosine, guanine, or uracil, such as hypoxanthine (the nucleobase in inosine), pseudouracil, pseudocytosine, iso-uracil, N3-glycosylated uracil, 1-methylpseudouracil, orotic acid, agmatidine, lysidine, 2-thiouracil, 2-thiothymine, 5-substituted pyrimidine (e.g., 5-halouracil, 5-halomethyluracil, 5-trifluoromethyluracil, 5-propynyluracil, 5-propynylcytosine, 5-aminomethyluracil, 5-hydroxymethyluracil, 5-formyluracil, 5-aminomethylcytosine, 5-formylcytosine), 5-hydroxymethylcytosine, 7-deazaguanine, 7-deazaadenine, 7-deaza-2,6-diaminopurine, 8-aza-7-deazaguanine, 8-aza-7-deazaadenine, 8-aza-7-deaza-2,6-diaminopurine, 8-oxo-adenine, 3-deazapurine (such as a 3-deaza-adenosine), pseudoisocytosine, N4-ethylcytosine, N2-cyclopentylguanine, N2-cyclopentyl-2-aminopurine, N2-propyl-2-aminopurine, 2,6-diaminopurine, 2-aminopurine, G-clamp and its derivatives, Super A, Super T, Super G, amino-modified nucleobases or derivatives thereof; and degenerate or universal bases, like 2,6-difluorotoluene, or absent like abasic sites (e.g., 1-deoxyribose, 1,2-dideoxyribose, 1-deoxy-2-O-methylribose, and azaribose).

[0150] In one aspect, the nucleotide analog is an analog of a nucleic acid nucleotide. In one aspect, the nucleotide analog is an analog of adenosine, guanosine, cytidine, thymidine, uridine, deoxyadenosine, deoxyguanosine, deoxycytidine, deoxythymidine, or deoxyuridine. In one aspect, the nucleotide analog is not guanosine or deoxyguanosine. In one aspect, the nucleotide analog is not a nucleic acid nucleotide. In one aspect, the nucleotide analog is not adenosine, guanosine, cytidine, thymidine, uridine, deoxyadenosine, deoxyguanosine, deoxycytidine, deoxythymidine, or deoxyuridine.

[0151] A nucleotide is generally connected to neighboring nucleotides through condensation of its 5′-phosphate moiety to the 3′-hydroxyl moiety of the neighboring nucleotide monomer. Similarly, its 3′-hydroxyl moiety is generally connected to the 5′-phosphate of a neighboring nucleotide monomer. This forms phosphodiester bonds. The phosphodiesters and the scaffold form an alternating copolymer. The bases are grafted on this copolymer, namely to the scaffold moieties. Because of this characteristic, the alternating copolymer formed by linked scaffolds of an oligonucleotide is often called the ‘backbone’ of the oligonucleotide. Because phosphodiester bonds connect neighboring monomers together, they are often referred to as ‘backbone linkages’. It is understood that when a phosphate group is modified so that it is instead an analogous moiety such as a PS, such a moiety is still referred to as the backbone linkage of the monomer. This is referred to as a ‘backbone linkage modification’. In general terms, the backbone of an oligonucleotide comprises alternating scaffolds and backbone linkages.

[0152] EONs as disclosed herein can comprise linkage modifications. A linkage modification can be, but not limited to, a modified version of the phosphodiester present in RNA, such as PS, chirally pure PS, (R)-PS, (S)-PS, MP, chirally pure MP, (R)-methyl phosphonate, (S)-methyl phosphonate, phosphoryl guanidine (such as PNdmi), chirally pure phosphoryl guanidine, (R)-phosphoryl guanidine, (S)-phosphoryl guanidine, phosphorodithioate (PS2), phosphonacetate (PACE), phosphonoacetamide (PACA), thiophosphonoacetate, thiophosphonoacetamide, methyl phosphorohioate, methyl thiophosphonate, PS prodrug, alkylated PS, H-phosphonate, ethyl phosphate, ethyl PS, boranophosphate, borano PS, methyl boranophosphate, methyl borano PS, methyl boranophosphonate, methyl boranophosphothioate, phosphate, phosphotriester, aminoalkylphosphotriester, and their derivatives. Another modification includes phosphoramidite, phosphoramidate, N3′→P5′ phosphoramidate, phosphorodiamidate, phosphorothiodiamidate, sulfamate, diethylenesulfoxide, amide, sulfonate, siloxane, sulfide, sulfone, formacetyl, alkenyl, methylenehydrazino, sulfonamide, triazole, oxalyl, carbamate, methyleneimino (MMI), and thioacetamide nucleic acid (TANA); and their derivatives. Various salts, mixed salts and free acid forms are also included, as well as 3′→3′ and 2′→5′ linkages.

[0153] In one aspect, an EON as disclosed herein comprises a substitution of one of the non-bridging oxygens in the phosphodiester linkage. This modification slightly destabilizes base-pairing but adds significant resistance to nuclease degradation. A preferred nucleotide analogue or equivalent comprises PS, phosphonoacetate, phosphorodithioate, phosphotriester, aminoalkylphosphotriester, H-phosphonate, methyl and other alkyl phosphonate including 3′-alkylene phosphonate, 5′-alkylene phosphonate and chiral phosphonate, phosphinate, phosphoramidate including 3′-amino phosphoramidate and aminoalkylphosphoramidate, thionophosphoramidate, thionoalkylphosphonate, thionoalkylphosphotriester, selenophosphate or boranophosphate. Particularly preferred are internucleoside linkages that are modified to contain a PS. Many of these non-naturally occurring modifications of the linkage, such as PS are chiral, which means that there are Rp and Sp configurations, known to the person skilled in the art. In one aspect, the chirality of the PS linkages is controlled, which means that each of the linkages is either in the Rp or in the Sp configuration, whichever is preferred. The choice of an Rp or Sp configuration at a specified linkage position may depend on the target sequence, the EON sequence, and the efficiency of binding and induction of providing RNA editing. However, if such is not specifically desired, a composition may comprise EONs as active compounds with both Rp and Sp configurations at a certain specified linkage position. Mixtures of such EONs are also feasible, wherein certain positions have preferably either one of the configurations, while for other positions such does not matter.

[0154] Again, in all cases, the modifications should be compatible with editing such that the EON fulfils its role as an editing producing oligonucleotide that can, when attached to its target sequence recruit an adenosine deaminase enzyme because of the dsRNA nature that arises. In all aspects, the enzyme with adenosine deaminase activity is preferably ADAR1 or ADAR2. In a highly preferred aspect, the EON is an RNA editing oligonucleotide that targets a pre-mRNA or an mRNA, wherein the target nucleotide is an adenosine in the target RNA, wherein the adenosine is deaminated to an inosine, which is being read as a guanosine by the translation machinery. The disclosure also provides a pharmaceutical composition comprising the EON as characterized herein, and a pharmaceutically acceptable carrier.

[0155] Other chemical modifications of the EON as disclosed herein include the substitution of one or more than one of any of the hydrogen atoms with deuterium or tritium, examples of which can be found in e.g., WO2014/022566 or WO2015/011694.

[0156] The disclosure also provides an EON as disclosed herein, or a pharmaceutical composition comprising an EON as disclosed herein, for use in the treatment, prevention, or amelioration of CVD, such as CAD. In one aspect, the disclosure provides an EON, or a pharmaceutical composition comprising an EON as disclosed herein, for use in the treatment, prevention, or amelioration of a disease wherein B4GALT1 functions in a wildtype manner. In one aspect, the disclosure provides an EON, or a pharmaceutical composition comprising an EON as disclosed herein, for use in the treatment, prevention or amelioration of a disease related to high LDL-C and/or fibrinogen levels. In one aspect, the disclosure provides an EON, or a pharmaceutical composition comprising an EON as disclosed herein, for use in the treatment or prevention of CVD, such as CAD.

[0157] EONs as disclosed herein preferably do not include a 5′-terminal 06-benzylguanosine or a 5′-terminal amino modification and preferably are not covalently linked to a SNAP-tag domain (an engineered 06-alkylguanosine-DNA-alkyl transferase). EONs as disclosed herein preferably do not comprise a boxB RNA hairpin sequence. In one aspect, an EON as disclosed herein comprises 0, 1, 2 or 3 wobble base pairs with the target sequence, and/or 0, 1, 2, 3, 4, 5, 6, 7, or 8 mismatching base pairs with the target RNA sequence. No mismatch may exist when the orphan nucleotide is uridine. One alternative for uridine is positioning an iso-uridine opposite the target adenosine, which does not pair like U pairs with A, and is therefore considered as a mismatch. Preferably, the target adenosine in the target sequence forms a mismatch base pair with the nucleoside in the EON that is directly opposite the target adenosine.

[0158] It should be noted that when an EON is delivered through a vector, for instance an AAV vector, chemical modifications are not present in the EON that acts on the target RNA molecule. Although it is preferred to use ‘naked’ EONs that have chemical modifications as outlined herein, EONs that are delivered through other means, for instance through AAV vector expression, or editing molecules that are circular, or have hairpin structures (recruiting portions, e.g., as disclosed in WO2016/097212, WO2017/050306, WO2020/001793, WO2017/010556, WO2020/246560, and WO2022/078995) are also encompassed by the present disclosure because these can also be applied to edit adenosines in the target B4GALT1 RNA molecule to generate a B4GALT1 protein with reduced function.

[0159] Notably, when the EON comprises chemical modifications, as detailed herein, it may still be delivered through the means of a delivery vehicle. Suitable delivery vehicles are nanoparticle delivery vehicles such as polymeric nanoparticles, dendrimers, inorganic nanoparticles and nanocrystals, organic nanocrystals, and liposomes. Preferred nanoparticles are Lipid Nanoparticles (LNP's) that are nano-sized lipid vesicles that carry the EON of the present disclosure and aid to the delivery of target cells. In the event that an LNP is applied or any other similar type of carrier, the EON is still considered naked because it is not transcribed from an encoding polynucleotide (such as in the case of a plasmid or a vector, in which the EON is not regarded as ‘naked’). So, even though a chemically modified EON is encapsulated by a carrier, preferably an LNP, it is still seen as naked, as it has been manufactured as such in a laboratory setting and encapsulated thereafter in the carrier using methods known to the person skilled in the art. The disclosure also relates to a delivery vehicle, preferably an LNP, which comprises a ‘naked’ and chemically modified EON as disclosed herein, even more preferably as disclosed in any one of SEQ ID NO:3 to 42, 59 to 1069, and 1078 to 1190, preferably from the group consisting of SEQ ID NO:23, 19, 31, 27, 35, 39, 69, 70, 71, 72, 73, 93, 94, 95, 1079, 1084, 1093, 1095, 1100, 1102, 1115, 1121, 1123, 1124, and 1139 to 1190. The person skilled in the art understands that when a delivery moiety, or attachment to the EON is used (such a GalNAc moiety to target hepatocytes in the liver) that the EON is still seen as naked as well, also when a GalNAc-(linker)-EON is encapsulated in a delivery vehicle such as an LNP.

[0160] An EON as disclosed herein can utilise endogenous cellular pathways and naturally available ADAR enzymes (=endogenous) to specifically edit a target adenosine in the target RNA sequence. An EON as disclosed herein can recruit endogenous ADAR and complex with it when present in a double-stranded complex with the target RNA molecule, and then facilitates the deamination of a (single) specific target adenosine nucleotide in a target RNA sequence. Ideally, only one adenosine is deaminated. An EON as disclosed herein, when complexed to ADAR, preferably brings about the deamination of a single target adenosine.

[0161] Analysis of natural targets of ADAR enzymes has indicated that these generally include mismatches between the two strands that form the RNA helix edited by ADAR1 or ADAR2. It has been suggested that these mismatches enhance the specificity of the editing reaction (Stefl et al. 2006. Structure 14 (2): 345-355; Tian et al. 2011. Nucleic Acid Res 39 (13): 5669-5681). Characterization of optimal patterns of paired/mismatched nucleotides between the EONs and the target RNA also appears important to the development of efficient ADAR-based EON therapy.

[0162] As outlined above, an EON as disclosed herein makes use of specific nucleotide modifications at predefined spots to ensure stability as well as proper ADAR binding and activity. These changes may vary and may include modifications in the backbone of the EON, in the sugar moiety of the nucleotides as well as in the nucleobases or the phosphodiester linkages, as outlined in detail herein. They may also be variably distributed throughout the sequence of the EON. Specific modifications may be needed to support interactions of different amino acid residues within the RNA-binding domains of ADAR enzymes, as well as those in the deaminase domain. For example, PS linkages between nucleotides or 2′-OMe or 2′-MOE modifications may be tolerated in some parts of the EON, while in other parts they should be avoided so as not to disrupt crucial interactions of the enzyme with the phosphate and 2′-OH groups. Specific nucleotide modifications may also be necessary to enhance the editing activity on substrate RNAs where the target sequence is not optimal for ADAR editing. Previous work has established that certain sequence contexts are more amenable to editing. For example, a target sequence 5′-UAG-3′ (with the target A in the middle) contains the most preferred nearest-neighbor nucleotides for ADAR2, whereas a 5′-CAA-3′ target sequence is disfavored (Schneider et al. 2014. Nucleic Acids Res 42 (10): e87). The structural analysis of ADAR2 deaminase domain hints at the possibility of enhancing editing by careful selection of the nucleotides that are opposite to the target trinucleotide. For example, the 5′-CAA-3′ target sequence, paired to a 3′-GCU-5′ sequence on the opposing strand (with the A-C mismatch formed in the middle), is disfavored because the guanosine base sterically clashes with an amino acid side chain of ADAR2. Although other adenosines in the B4GALT1 transcript may be targeted to impair the protein function, in a preferred aspect, the adenosine at position 1055 is deaminated. The disclosure also provides RNA editing oligonucleotides, generally referred to as EONs herein, that can bring about deamination of an adenosine in the B4GALT1 transcript, with a resulting B4GALT1 enzyme that has a reduced turnover rate. This means that it is not strictly limited to deamination of the adenosine at position 1055, but that other (single or multiple) adenosines may be targeted, which may also result in decreased B4GALT1 enzyme function. Other adenosines may be identified, for instance by genetic screening in the population, or in silico, that are also important for B4GALT1 function, and that also may be targeted through RNA editing, following the teaching of the present disclosure. All such RNA events and oligonucleotides that can be used for such targeting are encompassed by the present disclosure, no matter what the exact nucleic molecule, or EON, looks like.

[0163] Mutagenesis studies of human ADAR2 revealed that a single mutation at residue 488 from glutamate to glutamine (E488Q), gave an increase in the rate constant of deamination by 60-fold when compared to the wild-type enzyme (Kuttan & Bass. 2012. Proc Natl Acad Sci USA. 109 (48): 3295-3304). During the deamination reaction, ADAR flips the edited base out of its RNA duplex, and into the enzyme active site (Matthews et al. 2016. Nat Struct Mol Biol. 23 (5): 426-433). When ADAR2 edits adenosines in the preferred context (an A: C mismatch) the nucleotide opposite the target adenosine is referred to as the orphan cytidine. The crystal structure of ADAR2 E488Q bound to dsRNA revealed that the glutamine (Gln) side chain at position 488 can donate an H-bond to the N3 position of the orphan cytidine, which leads to the increased catalytic rate of ADAR2 E488Q. In the wild-type enzyme, wherein a glutamate (Glu) is present at position 488 instead of a glutamine (Gln) the amide group of the glutamine is absent and is instead a carboxylic acid. To obtain the same contact of the orphan cytidine with the E488Q mutant would then, for the wild-type situation, require protonation for this contact to occur. To make use of endogenously expressed ADAR2 to correct disease relevant mutations, it is essential to maximize the editing efficiency of the wild type ADAR2 enzyme present in the cell. WO2020/252376 discloses the use of EONs with modified RNA bases, especially at the position of the orphan cytidine to mimic the hydrogen-bonding pattern observed by the E488Q ADAR2 mutant. By replacing the nucleotide opposite the target adenosine in the EON with cytidine analogs that serve as H-bond donors at N3, it was envisioned that it would be possible to stabilize the same contact that is believed to provide the increase in catalytic rate for the mutant enzyme. Two cytidine analogs were of particular interest: pseudoisocytidine (also referred to as ‘piC’; Lu et al. 2009. J Org Chem. 74 (21): 8021-8030; Burchenal et al. 1976. Cancer Res 36:1520-1523) and Benner's base Z (also referred to as ‘Zd’; Yang et al. 2006. Nucl Acid Res. 34 (21): 6095-6101) that were initially selected because they offer hydrogen-bond donation at N3 with minimal perturbation to the shape of the nucleobase. Benner's base is also referred to as 6-amino-5-nitro-3-yl-2 (1H)-pyridone. The presence of the cytidine analog in the EON may exist in addition to modifications to the ribose 2′ group. The ribose 2′ groups in the EON can be independently selected from 2′-H (i.e., DNA), 2′-OH (i.e., RNA), 2′-OMe, 2′-MOE, 2′-F, or 2′-4′-linked (i.e., a bridged nucleic acid such as an LNA), or other 2′ substitutions. The 2′-4′ linkage can be selected from linkers known in the art, such as a methylene linker or constrained ethyl linker.

[0164] In one aspect, an EON comprises one or more sugar moieties that are mono- or di-substituted at the 2′, 3′ and/or 5′ position such as: —OH; -H; -F; substituted or unsubstituted, linear or branched lower (C₁-C₁₀) alkyl, alkenyl, alkynyl, alkaryl, allyl, or aralkyl, that may be interrupted by one or more heteroatoms; —O-, S-, or N-alkyl; —O-, S-, or N-alkenyl; —O-, S-, or N-alkynyl; —O—, S-, or N-allyl; —O-alkyl-O-alkyl; -methoxy; -aminopropoxy; -methoxyethoxy; -dimethylamino oxyethoxy; and -dimethylaminoethoxyethoxy.

[0165] In one aspect, a nucleotide analogue or equivalent within the EON comprises one or more base modifications or substitutions. Modified bases comprise synthetic and natural bases such as inosine, xanthine, hypoxanthine and other-aza, deaza, -hydroxy, -halo, -thio, thiol, -alkyl, -alkenyl, -alkynyl, thioalkyl derivatives of pyrimidine and purine bases that are or will be known in the art. Purine nucleobases and/or pyrimidine nucleobases may be modified to alter their properties, for example by amination or deamination of the heterocyclic rings. The exact chemistries and formats may vary from oligonucleotide construct to oligonucleotide construct and from application to application, and may be worked out in accordance with the wishes and preferences of those of skill in the art.

[0166] An EON as disclosed herein is normally longer than 10 nucleotides, preferably more than 11, 12, 13, 14, 15, 16, still more preferably more than 17 nucleotides. In one aspect the EON as disclosed herein is longer than 20 nucleotides. The EON as disclosed herein is preferably shorter than 100 nucleotides, still more preferably shorter than 60 nucleotides, still more preferably shorter than 50 nucleotides. In a preferred aspect, the EON as disclosed herein comprises 18 to 70 nucleotides, more preferably comprises 18 to 60 nucleotides, and even more preferably comprises 18 to 50 nucleotides. Hence, in a particularly preferred aspect, the EON as disclosed herein comprises 15, 16, 17, 18, 19, 20, 21, 22, 23, 24, 25, 26, 27, 28, 29, 30, 31, 32, 33, 34, 35, 36, 37, 38, 39, 40, 41, 42, 43, 44, 45, 46, 47, 48, 49 or 50 nucleotides. In one embodiment, the EON is 27, 28, 29, or 30 nucleotides in length.

[0167] In one aspect, at either end or both termini of an EON as disclosed herein, inverted deoxyT or dideoxyT nucleotides are incorporated.

### EXAMPLES

### Example 1. Editing of a Target Adenosine in a Human B4GALT1 Target RNA Molecule Using An In Vitro Biochemical Editing Assay

[0168] First, an initial set of the B4GALT1-targeting EONs (shown in FIG. 2) are tested to address editing of human B4GALT1 target (pre-) mRNA in an in vitro biochemical editing assay. To obtain the B4GALT1 target RNA a PCR is performed using a B4GALT1 G-block (IDT) which contains the sequence for the T7 promotor and (a part of) the sequence of HFE as template using forward primer 5′-CTC GAC GCA AGC CAT AAC AC-3′ (SEQ ID NO:43) and reverse primer 5′-TGG ACC GAC TGG AAA CGT AG-3′ (SEQ ID NO:44). The 5′ to 3′ G-block sequence (SEQ ID NO: 45) is as follows, in which the target adenosine is underlined and in bold, and in which the primer sequences are underlined:

TCTGGCTCGACGCAAGCCATAACACTAATACGACTCACTATAGGGTTAGTTTTTAGAGGCATGTCTATATCTCGCCC
AAATGCTGTGGTCGGGAGGTGTCGCATGATCCGCCACTCAAGAGACAAGAAAAATGAACCCAATCCTCAGAGGTTTG
ACCGAATTGCACACACAAAGGAGACAATGCTCTCTGATGGTTTGAACTCACTCACCTACCAGGTGCTGGATTACGTT
TCCAGTCGGTCCACGTTTG

[0169] The PCR product is then used as template for the in vitro transcription. The MEGAscript T7 transcription kit is used for this reaction. The RNA is purified on a urea gel and then extracted in 50 mM Tris-CI pH 7.4, 10 mM EDTA, 0.1% SDS, 0.3 M NaCl buffer and subsequently phenol-chloroform purified. The purified RNA is used as target in the biochemical editing assay.

[0170] Initially, EONs RM4439-RM4454 and RM4826-RM4849 are each annealed to the B4GALT1 target RNA, which is done in a buffer (5 mM Tris-CI pH 7.4, 0.5 mM EDTA and 10 mM NaCl) at the ratio 1:3 of target RNA to oligonucleotide (600 nM oligonucleotide and 200 nM target). The samples are heated at 95° C. for 3 min and then slowly cooled down to RT. Next, the editing reaction is carried out. The annealed oligonucleotide/target RNA is mixed with protease inhibitor (cOmplete™, Mini, EDTA-free Protease I, Sigma-Aldrich), RNase inhibitor (RNasin, Promega), poly A (Qiagen), tRNA (Invitrogen) and editing reaction buffer (15 mM Tris-CI pH 7.4, 1.5 mM EDTA, 3% glycerol, 60 mM KCl, 0.003% NP-40, 3 mM MgCl₂ and 0.5 mM DTT) such that their final concentration is 6 nM oligonucleotide and 2 nM target RNA. The reaction is started by adding purified ADAR2 (GenScript) to a final concentration of 6 nM into the mix and incubated for predetermined time points at 37° C. Each reaction is stopped by adding 95 μl of 95° C. 3 mM EDTA solution. A 6 μl aliquot of the stopped reaction mixture is then used as template for cDNA synthesis using Maxima reverse transcriptase kit (Thermo Fisher) with random hexamer primer (ThermoFisher Scientific). Initial denaturation of RNA is performed in the presence of the primer and dNTPs at 95° C. for 5 min, followed by slow cooling to 10° C., after which first strand synthesis is carried out according to the manufacturer's instructions in a total volume of 20 μl, using an extension temperature of 62° C. Products are amplified for pyrosequencing analysis by PCR, using the Amplitaq gold 360 DNA Polymerase kit (Applied Biosystems) according to the manufacturer's instructions, with 1 μl of the cDNA as template. Then PCR is performed using the following thermal cycling protocol: Initial denaturation at 95° C. for 5 min, followed by 40 cycles of 95° C. for 30 sec, 58° C. for 30 sec and 72° C. for 30 sec, and a final extension of 72° C. for 7 min.

[0171] Because inosines base-pair with cytidines during the cDNA synthesis in the reverse transcription reaction, the nucleotides incorporated in the edited positions during PCR will be guanosines. The percentage of guanosine (edited) versus adenosine (unedited) is defined by pyrosequencing. Pyrosequencing of the PCR products and data analysis is performed by the PyroMark Q48 Autoprep instrument (QIAGEN) following the manufacturer's instructions with 10 μl input of the PCR product and 4 μM sequencing primer: The analysis performed by the instrument provides the results for the selected nucleotide as a percentage of adenosine and guanosine detected in that position, and the extent of A-to-I editing at a chosen position is therefore measured by the percentage of guanosine in that position.

### Example 2. Editing of Human B4GALT1 Transcripts in HepG2 Cells

[0172] Editing of the endogenous human B4GALT1 transcript was investigated in human cells. For this, human HepG2 hepatocellular carcinoma cells were cultured in EMEM+10% FBS+1% P/S. Cells were kept at 37° C. in a 5% CO₂ atmosphere. In an initial experiment the EONs named RM4826 to RM4849 (see FIG. 2) were tested for editing efficiency. A total of 0.75×10⁵ HepG2 cells were seeded and treated with 1 or 5 μM EON, and 1 μM AG1856 (a saponin, also referred to as a triterpene glycoside; see WO2021/122998) was added per well. This mixture was kept on the cells for 72 hrs. Then, cells were collected, and total RNA was isolated from the transfected cells using the ReliaPrep™ RNA Miniprep kit. After removal of the culture medium, cells were washed once with PBS. After complete aspiration of the PBS, 100 μL lysis buffer was added to the wells to lyse the cells and collect the intracellular material. After addition of 35 μL isopropanol the mixtures were loaded in a column and subjected to several wash steps and DNase I treatment. After elution in a total volume of 15 μL DNase/RNase-free water, the RNA yield was determined using spectrophotometric analysis (NanoDrop) and stored at −80° C.

[0173] Maxima reverse transcriptase (RT, Thermo Fisher) was used to generate complementary DNA (cDNA). Typically, 500 ng total RNA was used in reaction mixture containing 4 μL 5×RT buffer, 2 μL dNTP mix (10 mM each), 0.5 μL Oligo (dT), 0.5 μL random hexamer and 0.5 μL Maxima reverse transcriptase (all Thermo Fisher) supplemented with DNase and RNase free water to a total volume of 20 μL. Samples were loaded in a T100 thermocycler (Bio-Rad) and initially incubated at 10 min at 25° C., followed by a cDNA reaction temperature of 30 min at 50° C. and a termination step of 5 min at 85° C. Samples were cooled down to 4° C. prior storing at −20° C.

[0174] To determine the editing efficiency, cDNA samples were used in two multiplex digital PCR (dPCR) assays. HepG2 cDNA samples were diluted 5 times before dPCR measurements. The first dPCR is designed to distinguish between cDNA species containing the original adenosine or the edited inosine, which is converted into a guanidine during cDNA synthesis. The first dPCR also quantifies the amount of B4GALT1 specific cDNA molecules in the mixture using a primer/probe set targeting exons 1 and 2. The second dPCR is designed to measure B4GALT1 exon 5 skip and housekeeping gene HPRT1. The primer and probe sequences are listed in Table 1.

TABLE 1
Primer and probe names and sequences (+ refers to an LNA nucleotide at the 3′ side)

| Name | Sequence 5′ to 3′ |
|---|---|
| hB4GALT1_e05_fw | TCCGCCACTCAAGAGACAAG (SEQ ID NO: 46) |
| hB4GALT1_e06_rv1 | GCACCTGGTAGGTGAGTGAG (SEQ ID NO: 47) |
| hB4GALT1_e01_fw | CCCGCTAGCAACTTGACCTC (SEQ ID NO: 48) |
| hB4GALT1_e02_rv | CCAGGTCCACAGGCATGTTA (SEQ ID NO: 49) |
| hB4GALT1_e04_fw | ATTATTGGGGCTGGGGAGGA (SEQ ID NO: 50) |
| hB4GALT1_e06_rv2 | AGCACCTGGTAGGTGAGTGA (SEQ ID NO: 51) |
| hHPRT1 e01-02 Fw 01 | CCTGGCGTCGTGATTAGTGA (SEQ ID NO: 52) |
| hHPRT1 e02-03 Rv 01 | CGAGCAAGACGTTCAGTCCT (SEQ ID NO: 53) |
| hB4GALT1_e05_edit_FAM | /56-FAM/GAACCC+A+G+TCCTCAG+AG/3IABkFQ/ |
| | (SEQ ID NO: 54) |
| hB4GALT1_e05_ori_HEX | /5HEX/A+TGA+ACCC+A+A+TCCTCAG+AG/3IABkFQ/ |
| | (SEQ ID NO: 55) |
| hB4GALT1_e01-02_TEX | /5TEX615/AGGAGTCCCCGCTGCTTGTG/3IAbRQSp/ |
| | (SEQ ID NO: 56) |
| hB4GALT1_e04-06_Cy5 | /5Cy5/GA+TGACAT+TTTTA+ACAGGTT+TG+ACC/3IAbRQSp/ |
| | (SEQ ID NO: 57) |
| hHPRT1_e02_TEX_01 | /5TEX615/GC+TGAGGATTTGGAAAGGGTGT (SEQ ID NO: 58) |

[0175] Digital PCR was performed using the QIAcuity 4, 5-plex, a QIAcuity PCR kit and 96-well 8.5K Nanoplates (Qiagen). In total 1.2 μL of the diluted cDNA mix was used in a dPCR mixture containing 3 μL 4×QIAcuity Mastermix, 0.6 μL per primer (10 UM stock concentration) and 0.3 μL per probe (10 μM stock concentration) supplemented with DNase and RNase free water to a total volume of 12 μL. The dPCR mixture was prepared in a pre-plate and then transferred into a 96-well 8.5 K Nanoplate and sealed with a Nanoplate seal. The plate was then transferred to the QIAcuity Four machine. First a priming and rolling step was performed to generate and isolate chamber partitions, followed by an amplification step using the following cycling protocol: 95° C. for 2 min for enzyme activation, 95° C. for 15 sec for denaturation, and 60° C. for 30 sec for annealing/extension for 40 cycles. The amplification step was followed by an image acquisition step of all wells. Data was analysed using the QIAcuity Suite Software (Qiagen).

[0176] The total amount of copies/ng RNA were determined by taking the sum of A-containing partitions, G-containing partitions, and exon 5 skip containing partitions per ng RNA. Percentage of A-to-I editing was determined by dividing the number of G-containing partitions by the total (G-plus A-containing partitions) per ng RNA multiplied by 100. Percentage of exon 5 skip was determined by dividing the number of exon 5 skip-containing partitions by the total copies/ng RNA.

[0177] Results of the RNA editing of the endogenous B4GALT1 transcript are provided in FIG. 3, which shows that the efficiency varied significantly between EONs, but that an increase from 1 μm EON to 5 μM EON provided higher editing levels. No editing was observed in the negative controls (AG1856 only, and non-treated samples (NT)). RM4826, RM4830, RM4834, RM4838, RM4842, and RM4846 appeared to give the highest RNA editing levels.

[0178] Since the binding of the EON to the target transcript may also interfere with splicing, and may or may not induce exon skipping events, it was investigated whether exon 5 of the B4GALT1 pre-mRNA was skipped during splicing. The c. 1055A target adenosine is in exon 5 of the B4GALT1 gene. The results are shown in FIG. 4 and indicate that some EONs gave a very high level of exon skipping (in some cases more than 70%), but the levels appear to be unrelated to the level of editing observed with the best 6 performing editing EONs mentioned above. The highest exon skipping percentages were observed with RM4832, RM4834, RM4836, RM4838, RM4839, RM4840, and RM4841. Low (er) levels of exon skipping were observed with RM4826, RM4827, RM4828, RM4829 (the 5 μM sample was lost in the process), RM4842, RM4843, RM4844, RM4845, RM4846, RM4847, RM4848, and RM4849. Interestingly, for the EONs that gave a lower percentage of skipping, these lower levels of exon skipping were observed in the samples with the higher concentration of EON (5 μM), instead of the lower concentration (1 μM). It remains to be determined whether exon skipping, induced by the treatment with the RNA editing oligonucleotides is an unwanted effect, or in contrast, a bonus effect, as outlined herein. The predominant reason to target c. 1055A in the B4GALT1 transcript is to lower the functionality of the B4GALT1 protein. Skipping exon 5 of the transcript (which is an in-frame event) may also result in a (shorter) protein with a lowered activity, which may be an additional beneficiary effect of the EON treatment.

### Example 3. Editing of Human B4GALT1 Transcripts in Liver Spheroids

[0179] Next, it was investigated whether RNA editing could also be achieved on endogenous B4GALT1 transcripts in liver spheroids grown from primary human hepatocytes. To generate spheroids, female primary human hepatocytes (PHH) cells (BioIVT) were used. As per the supplier's protocol, 1,500 cells/well of PHH cell suspension (15,000 cells/mL) were plated in a Nuclon Sphera low attachment U-bottom 96 well plates using INVITROGRO Spheroid Plating Medium in combination with Spheroid Medium Supplement A, TORPEDO Antibiotic Mix, and INVITROGRO Spheroid Spin Medium (all from BioIVT). The plates were then incubated for 5 days at 37° C. in a 5% CO₂ atmosphere.

[0180] After the incubation, the spheroids were transferred and pooled into Flat-bottom 96 well plates. The pooling resulted in 8 spheroids per well, with a total medium volume of 100 μL/well. To maintain the spheroid cultures, 100 μL of maintenance medium was added to each well and incubated for another 48 hrs at 37° C. in a 5% CO₂ atmosphere. The maintenance medium consisted out of INVITROGRO Spheroid Maintenance Medium (BioIVT), combined with Spheroid Medium Supplement A, which was also used during the treatment of the spheroids. Then, 100 μL of medium was removed from each well (containing the 7-day-old spheroids) and 100 μL of the treatment condition was added. Each well was treated with 1 or 5 μM EON and 1 μM AG1856 saponin (see above) for 72 hrs. For this initial spheroid experiment, four of the best performing EONs in cells (see above) were selected: RM4834, RM4838, RM4842, and RM4846. Negative controls were saponin only and NT samples.

[0181] After EON/saponin exposure, spheroids were collected, washed once with PBS and then 300 μL lysis buffer was added. RNA isolation, RNA yield determination, cDNA generation, editing efficiency using dPCR and exon 5 skipping effect assessments were performed as described in Example 2.

[0182] Results are shown in FIG. 5. In line with the results observed in the HepG2 cells, all four EONs could mediate relatively high levels of RNA editing of the endogenous B4GALT1 transcript in the PHH grown spheroids, with levels up to more than 30% (FIG. 5A). All four EONs performed in a similar range. Like what has been shown in Example 2, also exon 5 skipping was assessed in these spheroids, and the results are given in FIG. 5B. Interestingly, treatment with RM4834 and RM4838 resulted in relatively high levels of exon 5 skip (more than 40%), whereas RM4842 and RM4846 only caused a skipping percentage around 8%. No editing or exon skipping could be determined in the samples treated with saponin only (NT+AG in FIG. 5) alone or in the non-treated samples. This shows that RNA editing to significant levels could be achieved with a variety of antisense oligonucleotides, which unexpectedly differed significantly in their ability to influence splicing of the human B4GALT1 pre-mRNA.

### Example 4. Effect of Fibrinogen Levels after Editing of Human B4GALT1 Transcripts In Vitro

[0183] To study the effect of RNA editing of the c. 1055A target adenosine in human B4GALT1 transcripts on the secretion of fibrinogen, it is tested whether such RNA editing gives lower levels of fibrinogen in the supernatant of human hepatocellular carcinoma cell lines HepG2 and Huh-7 cells after treatment with EONs. For this, HepG2 cells are cultured in EMEM+10% FBS+1% P/S and Huh-7 cells are cultured in RPMI+10% FBS+1% P/S. Cells are kept at 37° C. in a 5% CO₂ atmosphere. A total of 0.75×10⁵ HepG2 cells and separately 0.5×10⁵ Huh-7 cells are seeded in 24-wells plates and treated with 5 μM EON and 1 μM AG1856 (see above) per well for 72 hrs. Then, cell culture medium supernatant is collected. These samples are centrifuged at 2000 g for 10 min. Subsequently, the supernatant is transferred to a new tube. These samples are diluted 1:500 and the fibrinogen levels are measured using a high sensitivity fibrinogen ELISA (ab241383, Abcam), as follows. 50 μL sample or standard is added to each well. Subsequently, 50 μL of antibody cocktail is added to the wells. After 1 hr of incubation at RT, the wells are washed 3 times with wash buffer. Then, 100 μL of TMB Development Solution is added to each well and the plate is incubated for 10 min in the dark. Lastly, 100 μL of Stop Solution is added to each well. The plate is measured using a plate reader (SpectraMax M5) at 450 nm. The standard curve is generated using the 4PL method in GraphPad (version 9.0.1). Raw values are corrected for the blank and the average is calculated from duplicate measurements. The fibrinogen levels are determined via interpolation using the standard curve. The fibrinogen levels are normalized to the RNA yield of NT+medium condition.

### Example 5. Editing of Human B4GALT1 Transcripts in Primary Human Hepatocytes

[0184] Next, a new set of EONs was designed, based on the best performing editors from the first editing screens (EON01 (RM4826), EON05 (RM4830), EON09 (RM4834), EON13 (RM4838), EON17 (RM4842), and EON21 (RM4846)). This new set of EONs with their respective chemical modifications is given in FIG. 6. Some of these EONs differ in the 5′ terminal part, since some EONs are complementary to exon 6 (hence, after splicing of intron 5 from the pre-mRNA), whereas some are complementary on the 5′ terminal part with intron 5 (hence, before splicing), see for instance the difference in the 5′ terminal parts of B4GALT1-32 (RM106386) and B4GALT1-218 (RM106292). Each one of the EONs in FIG. 6 (except for B4GALT1-134 (−)) comprises a tri-antennary GalNAc modification (L001=OP-042; Hongene Biotech) on the 5′ terminus, linked to the most terminal 5′ nucleotide through a TEG linker (L103) to stimulate entry into liver cells. The EONs and their attachments were manufactured according to standard protocols known to the person skilled in the art.

[0185] Using the new set of EONs, together with EON01 (RM4826) and EON05 (RM4830), editing of the endogenous human B4GALT1 transcript was investigated in primary human hepatocytes (PHH). A non-treated (NT) sample was taken along as a negative control. For this, a total of 0.5×10⁵ PHH cells (BioIVT) were plated using INVITGRO CP medium supplemented with TORPEDO Antibiotic Mix. Cells were kept at 37° C. in a 5% CO₂ atmosphere. Four hours after plating, the medium was refreshed with cultured in INVITROGRO HI medium supplemented with TORPEDO Antibiotic mix. The next day, cells were treated with 5 μM EON+1 UM AG1856 per well. This mixture was kept on the cells for 72 hrs. Then, the cells were washed once with PBS and 100 μL lysis buffer was added. Total RNA was isolated using the Direct-zol™ RNA Microprep kit (Zymo Research). After the addition of 100 UL ethanol (95-100%), the mixtures were loaded onto a column and subjected to several wash steps and DNase I treatment. After elution in a total volume of 15 μL DNase/RNase-free water, the RNA yield was determined using spectrophotometric analysis (NanoDrop) and stored at −80° C. Subsequently, RT reactions and dPCRs were performed as outlined in Example 2, with the indicated primers and probes.

[0186] Results are shown in FIG. 7, wherein in (A) the percentage editing is depicted obtained in these PHHs, clearly showing that EON05 (without a GalNAc moiety) was still one of the best performing EONs. This can be explained by the possibility that the GalNAc interaction with its respective receptor is less important to boost entry in vitro, whereas it may add significantly in in vivo settings. In any case, some of the new EONs clearly showed a beneficial effect over some of the others, with for instance B4GALT1-33 as one of the best performers. FIG. 7(B) shows the percentage skip of exon 5 in the same samples, clearly demonstrating a strong difference between some EON treatments. For instance, exon skip was close to zero after incubation with B4GALT1-212 and -213, whereas B4GALT1-175 and -176 EONs caused a relatively high percentage of skip. Strikingly, while EON01 and EON05 performed similarly in editing, there was a strong difference in causing exon 5 skip between these two (non-GalNAc containing) EONs.

[0187] Then, in a next experiment, it was investigated whether RNA editing could also be achieved in PHHs without adding the saponin, hence by using a simple co-incubation of the oligonucleotides in the medium of the cells (=gymnotic uptake, or ‘gymnosis’). The entire experimental setup was identical to the above setup with the exception that no saponin was added together with the EONs. All downstream RNA purification and dPCR steps were as mentioned above.

[0188] The results of this experiment are shown in FIG. 8, wherein (A) shows the percentage RNA editing after gymnotic uptake of the indicated EONs, which is clearly (and expectedly) lower than in FIG. 7 (where saponin was used as a ‘transfection agent’), but still significantly over background. It should be noted that low levels of editing do not necessarily mean that a downstream effect on the protein and the functionality thereof is also low, as described herein above. Editing percentages caused by the EONs was in the range of 1%, except for B4GALT1-132 that showed levels as high as 4%. The percentage of exon skipping (exon 5) was also determined in these samples. In line with the lower editing levels, also lower levels of exon skipping was found, see FIG. 8(B), with a similar pattern as was found in the experiment wherein saponin was used for improved entry of the oligonucleotides into the cells.

### Example 6. Editing of B4GALT1 Transcripts in Primary Mouse Hepatocytes

[0189] A similar experiment as outlined in example 5, in which no saponin was applied, was performed using primary mouse hepatocytes (PMH). Primary mouse hepatocytes were isolated from mouse liver using the Liver perfusion kit (Miltenyi) and the GentleMACS Octo Dissociator with Heaters (Miltenyi) according to manufacturer's instruction. In more detail, livers were dissected from mice, washed with PBS, and transferred to the GentleMACS Octo Dissociator with Heaters. An automated program 37C_m_LIPK_1 was run, consisting of different steps including priming, initial perfusion, washing, equilibration and enzymatic perfusion. After the perfusion process was completed, the perfused liver lobe and used enzyme solution were transferred to a gentIMACS C tube (Miltenyi). Subsequently, the gentIMACS C tube was transferred back into the Octo Dissociator and the program LIPK_HR_1 was run to further release hepatocytes from the perfused liver. Finally, the cell solution was passed through a MACS 100 μM SmartStrainer (Miltenyi) to enrich hepatocytes. A debris removal kit (Miltenyi) was used to remove debris from the cell solution. The cell pellet was resuspended in 5 mL DMEM+5% FBS+1% P/S. Cells were counted and a total of 0.75×10⁵ cells were seeded. Cells were treated with 5 μM EON using Williams E medium+2 mM Glutamine+1% P/S and this mixture was kept on the cells for 72 hrs. RNA isolation, RNA yield determination, cDNA generation, editing efficiency using dPCR and exon 5 skipping effect assessments were performed as described in Example 2. However, only one dPCR mix was used that combines assays for editing, exon 5 skip and B4GALT1 expression in exon 1-2 using primers and probes specifically for mouse, as given in Table 2.

TABLE 1
Primer and probe names and sequences (+ refers to an LNA nucleotide at the 3′ side)

| Name | Sequence 5′ to 3′ |
|---|---|
| mB4GALT1_e04_fw | ATTATTGGGGTTGGGGAGGA (SEQ ID NO: 1070) |
| mB4GALT1_e06_rv1 | CCAACACCTTGTAGGTAAGTGA (SEQ ID NO: 1071) |
| mB4GALT1_e05_edit_FAM | /56-FAM/TGAGCCC+A+G+TCCTCAG+AG/3IABkFQ/ |
| | (SEQ ID NO: 1072) |
| mB4GALT1_e05_ori_HEX | /5HEX/A+TG+AGCCC+A+A+TCCTCAG+AG/3IABkFQ/ |
| | (SEQ ID NO: 1073) |
| mB4GALT1_e01_fw | GGCTGTATTCCCCTCCA (SEQ ID NO: 1074) |
| mB4GALT1_e02_rv | GTTCAATGGGGTACTTCAGG (SEQ ID NO: 1075) |
| mB4GALT1_e01_e02_Ref_TEX | /5TEX615/AGGAGTCCCCGCTGCTCGTTG/3IAbRQSp/ |
| | (SEQ ID NO: 1076) |
| mB4GALT1_e04-06_Cy5 | /5Cy5/ACAT+TTT+TAA+CAGGT+TTGACCGGA+T/3IAbRQSp/ |
| | (SEQ ID NO: 1077) |

[0190] The results of these experiments are shown in FIG. 9, wherein (A) displays the percentage editing using the same EONs. These EONs are—except for the orphan nucleotide opposite the target adenosine—100% complementary to the target sequence in the human B4GALT1 (pre-) mRNA transcript. The target sequence in Mus musculus comprises a G five nucleotides from the target A in the 5′ direction, which means that the nucleotide at position-5 in the EONs of FIG. 6 (generally a uridine) forms a G: U base pair with the mouse target transcript sequence. As was shown in WO2017/220751, this is not necessarily unfavourable. Additional mismatches, bulges and/or wobbles on top of the mismatch at the orphan position may contribute to a better recognition of the ADAR enzymes in the cell of the double-stranded RNA complex that is formed and seen as a more suitable target configuration. If this is indeed the case, the data shown in FIG. 9(A) supports this, because higher levels of editing were observed in these PMH's than in PHH's (see FIG. 8(A)) under these circumstances (no saponin added). EON05 (RM4830; SEQ ID NO:23) performed best with editing levels reaching more than 10%. In line with the results in the PHHs, it remains to be seen how much the GalNAc moiety contributes to cell entry in in vitro setups like this. Nevertheless, RNA editing levels of the best performing EONs were in the range of 5%. Exon 5 skipping percentages, shown in FIG. 9(B), were along a similar pattern as observed with PHHs, described above.

### Example 7. Editing of Human B4GALT1 Transcripts in Primary Human Hepatocytes Using EONs Captured in Lipid Nanoparticles as a Delivery Vehicle

[0191] In a next experiment, it was investigated whether a different type of delivery method, in which the EONs are encompassed within a so-called Lipid Nanoparticle (LNP) would contribute to the delivery of the oligonucleotides to the target cells. For this, EON05 (RM4830; SEQ ID NO: 23; see FIG. 2), EON13 (RM4838; SEQ ID NO:31; see FIG. 2), and B4GALT1-134 (−) (RM107261; SEQ ID NO: 1069), which is identical to B4GALT1-134 but without a GalNAc moiety and TEG linker, and herein also referred to as EON134; see FIG. 6) were selected.

[0192] LNP formulations containing the EONs were manufactured as disclosed in WO2015/048020. Lipid stock was first prepared in ethanol. Then, these lipids were mixed in a molar ratio of DLin-MC3-DMA (50), Cholesterol (38.5), DSPCV (10) and PEG-200-DMG (1.5). The formulation process can be summarized as follows. The respective EONs were mixed with lipids in a ratio of 1 to 3.6 in a microfluidic device. Formulated LNPs were further concentrated in Tangential Flow Filtration (TFF) system, undergoing 12 hr dialysis for buffer exchange, and then sterilized by sterile filtration. The final solution concentration was 1 mg/mL. Storage of the LNP formulations containing EONs was in glass vials at 2-8° C. until further use.

[0193] PHHs were obtained and plated as described in Example 5. A total of 0.5×10⁵ cells per well were seeded 24 hr before incubation with the LNP formulations. A concentration range of 0.01 to 10 UM EON05-LNP, EON13-LNP, and EON134-LNP in INVITROGRO HI medium+TORPEDO Antibiotic mix+10% FBS was used in per well for 72 hr. Harvesting, RNA isolation, cDNA preparation, and dPCR procedures were performed as described in Example 2.

[0194] FIG. 10(A) shows the editing percentages that were obtained in the PHHs using the three LNP formulations as indicated using the different indicated concentrations and using an untreated sample as a negative control. This shows that at the time point that the cells were harvested, a concentration of 1 μM worked best under these conditions, and that (without the aid of saponin) editing levels up to 10% could be reached by using the EON05-LNP formulation. Like the experiments described above, the percentage exon 5 skip was also determined in these samples, which gave the predicted results based on the percentage editing that was determined, see FIG. 10(B).

### Example 8. Editing of B4GALT1 Transcripts in Mouse Liver Cells

[0195] The three LNP preparations described in Example 7 (EON05-LNP, EON13-LNP, and B4GALT1-134(−) (~EON134-LNP)) were also used in an in vivo experiment in which mice were injected intravenously (IV) with the LNP formulations or controls. The setup of the in vivo experiment was as follows, in which the dose level of the oligonucleotide was 3 mg/kg body weight for all mice, except that the repeated dosing in group 6 and the initial dosing of the mice for day 2 and day 4 in group 5 was 1.5 mg/kg body weight:

| | | | Necropsy | Group | |
|---|---|---|---|---|---|
| Group | Test particle | Dosing days | days | size | Total |
| 1 | vehicle | 0 | 2, 4, 7 | 8 | 24 |
| 2 | vehicle | 0, 7, 14, 21, 28 | 30 | 8 | 8 |
| 3 | Actb-LNP | 0 | 2, 4, 7 | 6 | 18 |
| 4 | B4GALT1-05-LNP | 0 | 2, 4, 7 | 6 | 18 |
| 5 | B4GALT1-13-LNP | 0 | 2, 4, 7 | 6 | 18 |
| 6 | B4GALT1-13-LNP | 0, 7, 14, 21, 28 | 30 | 8 | 8 |
| 7 | B4GALT1-134-LNP | 0 | 2, 4, 7 | 6 | 18 |

[0196] The negative control vehicle was an LNP formulation without any oligonucleotide, whereas the Actb-LNP was an LNP formulation with an oligonucleotide (RM3891) against a human Actin B target sequence, which formulation also served as a negative control in this experiment.

[0197] At the indicated necropsy days, the mice were sacrificed according to standard procedures and then blood samples were collected and organs, including the liver, were dissected. RNA was isolated from liver tissue. 1 mL of Trizol (Thermo Fisher) was added to the liver tissue in 2 mL tubes with 1.4 mm ceramic beads (Thermo Fisher) and samples were homogenized using a Beadmill 24 for 25 sec at 6 m/s. Tissue homogenate was transferred to a 1.5 mL Eppendorf tube and 200 μL chloroform (VWR) was added per 1 mL homogenate. After centrifuging at 12.000 g for 15 min at 4° C., 300 μL of the aqueous layer was transferred to a new 1.5 mL Eppendorf tube. Then 300 μL isopropanol was added and the RNA isolation was proceeded using the ReliaPrep™ RNA Miniprep kit. The mixtures were loaded in a column and subjected to several wash steps and DNase I treatment. Elution was done using total volume of 50 μL DNase/RNase-free water. RNA yield determination, cDNA generation, editing efficiency using dPCR and exon 5 skipping effect assessments were performed as described in Example 2.

[0198] FIG. 11(A) shows the editing percentage in the liver of the mice in each of the treated groups at day 2, 4, 7, and 30, as indicated, in comparison to the Actb-LNP control (RM3891-LNP) and PBS. These results show that it was possible to reach editing levels as high as 2% two days after administration, which was significantly higher than what was observed in the livers of mice that were treated with the negative control. The editing percentages reduce over time, as seen in the samples of day 4, day 7 and day 30. FIG. 11(B) shows the percentage of exon 5 skip in the same samples, again confirming the results observed in the cells and liver spheroids above.

### Example 9. Editing of Human B4GALT1 Transcripts in Primary Human Hepatocytes

[0199] To investigate the potential of what has been disclosed herein and further varying the chemical modifications and lengths of the oligonucleotides to ultimately improve on the editing of B4GALT1 transcripts, an additional set of 960 EONs was designed that each or independently are tested in PHHs, PMHs, liver spheroids, and/or in vivo as outlined in the previous examples. These 960 EONs with their respective RM numbers and chemical modifications are provided in FIG. 12. From this set, as well as from the other designed EONs outlined intra, the best performing candidates are used either with or without a GalNAc moiety (and TEG linker) and formulated in an LNP formulation if needed. These best performing candidates are taken into further (pre-) clinical development to ultimately treat CVD in patients in need thereof.

### Example 10. Editing of Human B4GALT1 Transcripts in Primary Human Hepatocytes

[0200] Yet, another set of 22 EONs was designed that were tested together with some of the better performing editing-causing EONs from earlier screens:

$$B 4 GALT 1 - 05 = EON 05 = RM 4830 = SEQ ID NO : 23 ;$$

$$B 4 GALT 1 - 13 = EON 13 = RM 4838 = SEQ ID NO : 31 ;$$

$$B 4 GALT 1 - 69 = RM 107689 = SEQ ID NO : 1064 ; and$$

$$B 4 GALT 1 - 84 = RM 107704 = SEQ ID NO : 1068.$$

[0201] This new set of 22 EONs with their respective RM numbers and chemical modifications is given in FIG. 13.

[0202] Using the EONs, editing of the endogenous human B4GALT1 transcript was investigated in PHHs. A non-treated (NT) sample and a sample with saponin alone were taken along as negative controls. Cells were cultured, plated, and treated as indicated above in Example 5, except that the cells were co-treated with 0.5 UM AG1856 per well. RNA purification, cDNA generation and dPCRs were performed as outlined in Example 2, with the indicated primers and probes.

[0203] Results are depicted in FIG. 14, which shows that all the tested EONs provided relatively high levels of editing, with B4GALT1-13, B4GALT1-65 (SEQ ID NO: 1079), B4GALT1-71 (SEQ ID NO: 1084), B4GALT1-80 (SEQ ID NO: 1093), and B4GALT1-82 (SEQ ID NO: 1095) performing best.

### Example 11. Exon 5 Skipping in Human B4GALT1 Transcripts after EON Treatment

[0204] As discussed hereinabove, the aim of the EONs is to cause editing of the human B4GALT1 transcript by introducing an A>I deamination, thereby generating an N352S mutation (or ‘variant’) in the protein sequence. The target adenosine at position 1055 in the transcript is relatively close to the 3′ terminus of exon 5 in the pre-mRNA, and it was observed that some of the EONs as disclosed herein cause (besides triggering the desired RNA editing) also the skip of exon 5 from the pre-mRNA, which results in an out-of-frame transcript, which in turn also causes the downregulation of active B4GALT1. Hence, although splice modulation is often unwanted, in this case it may be seen as a side-effect (or an unexpected bonus effect), which may be beneficial in the treatment of CVD. Therefore, it was investigated to what extent the position of the complementary sequence of the EON with the target RNA would influence the skipping of exon 5. For this, a large set of EONs were designed, with 12 separate EONs of the same length but with different chemical modifications (including GalNac and a TEG linker) in 9 separate sets. Hence, 9×12 EONs were tested in their ability to cause exon skipping, from which it could potentially be determined how their position would relate to the efficiency in exon skipping. FIG. 15(A) shows the exon5/exon6 boundary and the relative position of the target A in exon 5. Below that schematic representation, the positions of the 9 sets of EONs are provided, in which it should be noted that these are represented schematically from 3′ to 5′ with the 5′ ends of the EONs extending into intron 5 such that it predominantly targets the pre-mRNA. The EONs were tested in PHH cells with 5×10⁴ cells per well in a 96-well format and incubated in a concentration of 5 μM EON and co-treated with 1 μM AG1856. RM105550 (=B4GALT1-13 with a GalNAc moiety but without a TEG linker; identical to RM106564; SEQ ID NO:1100) served as a control. After 72 hr cells were harvested and subsequently exon 5 skip was determined as described above. FIG. 15(B) shows the results obtained with all separate EONs. Below the graph the subsets are given. This result clearly shows that when the EON is complementary to a sequence that is relatively far away from the 3′ end of exon 5, more exon skipping is observed. However, when the complementarity ‘moves’ towards the exon5/intron5 boundary, skipping efficiency decreased significantly. This shows that the position of the EON and where it hybridizes to the target sequence not only influences the RNA editing, but also has an impact on the skipping of exon 5, which together may add to downregulating the function of the B4GALT1 protein, as desired and as discussed herein.

### Example 12. Editing of Human B4GALT1 Transcripts in Primary Human Hepatocytes Using EONs with Varying Position of the 2′-Fluor Modification

[0205] It was tested whether the positions of the 2′-F modifications present in the EON would influence the effect on RNA editing and/or on exon 5 skipping. For this, a set of 20 EONs was designed based on the sequence and modifications described for B4GALT1-13 (RM106564; SEQ ID NO: 1100, which is identical to RM105550 in FIG. 15). The different B4GALT1-13-based EONs and their 2′-F patterns are provided in FIG. 16 (SEQ ID NO: 1101 to 1120). This shows that RM 106949 (SEQ ID NO: 1101)-except for one position-completely lacks 2′-F modifications. Using these EONs, the same experiment as outlined in Example 11 was performed except that the purified RNA was used to determine exon 5 skip percentages, for cDNA generation and a dPCR to determine RNA editing of the target adenosine. FIG. 17(A) shows the editing percentages (black bars) and the percentage exon 5 skip (open bars) for each of the 20 EONs in comparison to B4GALT1-13 (RM106564; SEQ ID NO: 1100 (see also RM4838; SEQ ID NO:31)). Strikingly, while RM106564 gave an editing percentage of around 22%, and an exon skip percentage of 43%, RM106949 gave significant exon skip (>50%) but hardly any RNA editing, suggesting that the 2′-OMe modifications that are present instead of the 2′-F modifications hamper proper deamination by the ADAR enzyme for this target, while not interfering with splice modulation. Importantly, some EONs, such as RM106950 (SEQ ID NO: 1102) and RM106963 (SEQ ID NO:1115), showed editing percentages above 30%, while the exon 5 skipping was below 30%, indicating that the positions of the 2′-F modifications are important for obtaining the different effects. A similar experiment was performed with 17 EONs (SEQ ID NO: 1122 to 1138) that were based on the B4GALT1-21 EON (RM106566; SEQ ID NO: 1121 (see also RM4846; SEQ ID NO: 39)). The results of an identical experiment are shown in FIG. 17(B) and indicate that some EONs such as RM106970 (SEQ ID NO:1123) and RM 106971 (SEQ ID NO:1124) performed equally well as RM106566 in editing (up to 35%) and exon 5 skipping (around 2%).

1. An RNA editing oligonucleotide (EON) that can form a double-stranded complex with a region of a target RNA nucleic acid molecule in a human cell, wherein the double-stranded complex can recruit an endogenous ADAR enzyme naturally present in the cell, wherein the region comprises a target adenosine, wherein the nucleotide in the EON that is opposite the target adenosine is the orphan nucleotide, wherein the ADAR enzyme deaminates the target adenosine into an inosine, and wherein the target RNA nucleic acid molecule is a transcript molecule of the human β-1,4-galactosyl-transferase 1 (B4GALT1) gene.

2. An EON according to claim 1, wherein the B4GALT1 transcript molecule is a pre-mRNA or an mRNA molecule.

3. An EON according to claim 1 or 2, wherein the cell is a human liver cell, preferably a hepatocyte.

4. An EON according to any one of claims 1 to 3, wherein the target adenosine is at a position in the B4GALT1 transcript where a guanosine would encode a B4GALT1 protein variant that has a reduced enzymatic turnover rate.

5. An EON according to any one of claims 1 to 4, wherein the target adenosine is at position c. 1055A in the B4GALT1 transcript, and wherein the deamination results in a change from asparagine (N; Asn) to serine (S; Ser) at position 352 in the human wildtype B4GALT1 amino acid sequence.

6. An EON according to any one of claims 1 to 5, wherein at least one nucleotide comprises one or more non-naturally occurring chemical modifications in the ribose, linkage, or base moiety, with the proviso that the orphan nucleotide is not a cytidine comprising a 2′-OMe ribose substitution.

7. An EON according to claim 6, wherein the one or more modifications in the linkage is each independently selected from a phosphorothioate (PS), a phosphonoacetate, phosphorodithioate, a methylphosphonate (MP), a sulfonylphosphoramidate, or a PNdmi internucleoside linkage.

8. An EON according to claim 6 or 7, wherein the one or more modifications in the ribose moiety is a mono- or di-substitution at the 2′, 3′ and/or 5′ position of the ribose, each independently selected from the group consisting of: —OH; —F; substituted or unsubstituted, linear or branched lower (C₁-C₁₀) alkyl, alkenyl, alkynyl, alkaryl, allyl, or aralkyl, that may be interrupted by one or more heteroatoms; —O-, S-, or N-alkyl; —O-, S-, or N-alkenyl; —O-, S-, or N-alkynyl; —O-, S-, or N-allyl; —O-alkyl-O-alkyl; -methoxy; -aminopropoxy; -methoxyethoxy; -dimethylamino oxyethoxy; and -dimethylaminoethoxyethoxy.

9. An EON according to any one of claims 1 to 8, wherein the EON comprises or consists of an EON selected from the group provided in SEQ ID NO:3 to 42, 59 to 1069, and 1078 to 1190, preferably selected from the group consisting of SEQ ID NO:23, 19, 31, 27, 35, 39, 69, 70, 71, 72, 73, 93, 94, 95, 1079, 1084, 1093, 1095, 1100, 1102, 1115, 1121, 1123, 1124, and 1139 to 1190.

10. An EON according to any one of claims 1 to 9, wherein the orphan nucleotide is a deoxynucleotide carrying a 6-amino-5-nitro-3-yl-2 (1H)-pyridone nucleobase or an iso-uracil nucleobase.

11. A vector, preferably a viral vector, more preferably an adeno-associated virus (AAV) vector, comprising a nucleic acid molecule encoding an EON according to any one of claims 1 to 5.

12. A nanoparticle delivery vehicle formulation that comprises an EON according to any one of claims 1 to 10.

13. A nanoparticle delivery vehicle formulation according to claim 12, wherein the nanoparticle delivery vehicle is a Lipid Nanoparticle (LNP).

14. A pharmaceutical composition comprising an EON according to any one of claims 1 to 10, a vector according to claim 11, or a nanoparticle delivery vehicle formulation according to claim 12 or 13, and a pharmaceutically acceptable carrier.

15. An EON according to claims 1 to 10, a vector according to claim 11, a nanoparticle delivery vehicle formulation according to claim 12 or 13, or a pharmaceutical composition according to claim 14, for use in the treatment of cardiovascular disease (CVD).

16. Use of an EON according to claims 1 to 10, a vector according to claim 11, a nanoparticle delivery vehicle formulation according to claim 12 or 13, or a pharmaceutical composition according to claim 14, in the manufacture of a medicament for the treatment of CVD.

17. An in vitro, ex vivo, or in vivo method of editing a B4GALT1 transcript molecule, the method comprising contacting the B4GALT1 transcript molecule, or a part thereof, with an AON according to any one of claims 1 to 10, thereby editing the B4GALT1 transcript molecule.

18. A method of treating, slowing down, or ameliorating CVD in a patient in need thereof, the method comprising contacting a B4GALT1 transcript molecule in a cell of the subject with an EON according to any one of claims 1 to 10, thereby treating the patient.

19. A method for the deamination of a target adenosine in an B4GALT1 transcript molecule in a cell, the method comprising the steps of:
(i) providing the cell with an EON according to any one of claims 1 to 10;
(ii) allowing uptake by the cell of the EON;
(iii) allowing annealing of the EON to the B4GALT1 transcript molecule;
(iv) allowing an endogenous ADAR enzyme that is naturally present in the cell to deaminate the target adenosine in the target RNA molecule to an inosine; and optionally
(v) identifying the presence of the inosine in the target RNA molecule.

20. A method according to claim 19, wherein the cell is a human cell, preferably a liver cell, more preferably a hepatocyte, wherein the target adenosine is at position c. 1055A in the B4GALT1 transcript, and wherein the deamination results in a change from asparagine (N; Asn) to serine (S; Ser) at position 352 in the human wildtype B4GALT1 amino acid sequence.

21. A method according to claim 19 or 20, wherein step (v) comprises:
a) sequencing the B4GALT1 pre-mRNA or mRNA molecule, or a cDNA derived thereof;
b) assessing the presence of a 352Ser B4GALT1 protein variant; or
c) using a functional read-out, preferably assessing a reduction rate of UDP-Gal, or assessing glycosylation levels of transferrin in serum.

The application's sequence listing, which the Patent Office published only in electronic form, follows.

SEQUENCE LISTING (1190 sequences)

SEQ ID NO: 1 - RNA, 1197 nt, Homo sapiens
  source 1..1197: mol_type = mRNA
atgaggcttcgggagccgctcctgagcggcagcgccgcgatgccaggcgcgtccctacagcgggcctgccgcctgctcgtggccgtctgcgctctgcaccttggcgtcaccctcgtttactacctggctggccgcgacctgagccgcctgccccaactggtcggagtctccacaccgctgcagggcggctcgaacagtgccgccgccatcgggcagtcctccggggagctccggaccggaggggcccggccgccgcctcctctaggcgcctcctcccagccgcgcccgggtggcgactccagcccagtcgtggattctggccctggccccgctagcaacttgacctcggtcccagtgccccacaccaccgcactgtcgctgcccgcctgccctgaggagtccccgctgcttgtgggccccatgctgattgagtttaacatgcctgtggacctggagctcgtggcaaagcagaacccaaatgtgaagatgggcggccgctatgcccccagggactgcgtctctcctcacaaggtggccatcatcattccattccgcaaccggcaggagcacctcaagtactggctatattatttgcacccagtcctgcagcgccagcagctggactatggcatctatgttatcaaccaggcgggagacactatattcaatcgtgctaagctcctcaatgttggctttcaagaagccttgaaggactatgactacacctgctttgtgtttagtgacgtggacctcattccaatgaatgaccataatgcgtacaggtgtttttcacagccacggcacatttccgttgcaatggataagtttggattcagcctaccttatgttcagtattttggaggtgtctctgctctaagtaaacaacagtttctaaccatcaatggatttcctaataattattggggctggggaggagaagatgatgacatttttaacagattagtttttagaggcatgtctatatctcgcccaaatgctgtggtcgggaggtgtcgcatgatccgccactcaagagacaagaaaaatgaacccaatcctcagaggtttgaccgaattgcacacacaaaggagacaatgctctctgatggtttgaactcactcacctaccaggtgctggatgtacagagatacccattgtatacccaaatcacagtggacatcgggacaccgagctag

SEQ ID NO: 2 - protein, 398 aa, Homo sapiens
MRLREPLLSGSAAMPGASLQRACRLLVAVCALHLGVTLVYYLAGRDLSRLPQLVGVSTPLQGGSNSAAAIGQSSGELRTGGARPPPPLGASSQPRPGGDSSPVVDSGPGPASNLTSVPVPHTTALSLPACPEESPLLVGPMLIEFNMPVDLELVAKQNPNVKMGGRYAPRDCVSPHKVAIIIPFRNRQEHLKYWLYYLHPVLQRQQLDYGIYVINQAGDTIFNRAKLLNVGFQEALKDYDYTCFVFSDVDLIPMNDHNAYRCFSQPRHISVAMDKFGFSLPYVQYFGGVSALSKQQFLTINGFPNNYWGWGGEDDDIFNRLVFRGMSISRPNAVVGRCRMIRHSRDKKNEPNPQRFDRIAHTKETMLSDGLNSLTYQVLDVQRYPLYTQITVDIGTPS

SEQ ID NO: 3 - DNA, 32 bp, synthetic construct
  source 1..32: mol_type = other DNA
  misc_feature 19..20: note = DNA
  misc_feature order(1..18,21..32): note = RNA
  modified_base order(18,23): mod_base = OTHER; note = 2-Prime-O-Methoxyethyl modified nucleoside
  modified_base order(7,9,11,13,15,17,22,24,26,28,30): mod_base = OTHER; note = 2-Prime-Fluoro modified nucleoside
  modified_base order(1..6,8,10,12,14,16,21,25,27,29,31..32): mod_base = OTHER; note = 2-Prime-O-Methyl modified nucleoside
  modified_base 1..32: mod_base = OTHER; note = Phosphorothioate linkage
  modified_base 20: mod_base = m5u; note = 5-methyluridine
  misc_feature 1..32: note = RM4439
cggtcaaacctctgaggactgggttcattttt

SEQ ID NO: 4 - DNA, 30 bp, synthetic construct
  source 1..30: mol_type = other DNA
  misc_feature 19..20: note = DNA
  misc_feature order(1..18,21..30): note = RNA
  modified_base order(18,23): mod_base = OTHER; note = 2-Prime-O-Methoxyethyl modified nucleoside
  modified_base order(7,9,11,13,15,17,22,24,26,28,30): mod_base = OTHER; note = 2-Prime-Fluoro modified nucleoside
  modified_base order(1..6,8,10,12,14,16,21,25,27,29): mod_base = OTHER; note = 2-Prime-O-Methyl modified nucleoside
  modified_base 1..30: mod_base = OTHER; note = Phosphorothioate linkage
  modified_base 20: mod_base = m5u; note = 5-methyluridine
  misc_feature 1..30: note = RM4440
cggtcaaacctctgaggactgggttcattt

SEQ ID NO: 5 - DNA, 28 bp, synthetic construct
  source 1..28: mol_type = other DNA
  misc_feature 19..20: note = DNA
  misc_feature order(1..18,21..28): note = RNA
  modified_base order(18,23): mod_base = OTHER; note = 2-Prime-O-Methoxyethyl modified nucleoside
  modified_base order(7,9,11,13,15,17,22,24,26,28): mod_base = OTHER; note = 2-Prime-Fluoro modified nucleoside
  modified_base order(1..6,8,10,12,14,16,21,25,27): mod_base = OTHER; note = 2-Prime-O-Methyl modified nucleoside
  modified_base 1..28: mod_base = OTHER; note = Phosphorothioate linkage
  modified_base 20: mod_base = m5u; note = 5-methyluridine
  misc_feature 1..28: note = RM4441
cggtcaaacctctgaggactgggttcat

SEQ ID NO: 6 - DNA, 26 bp, synthetic construct
  source 1..26: mol_type = other DNA
  misc_feature 19..20: note = DNA
  misc_feature order(1..18,21..26): note = RNA
  modified_base order(18,23): mod_base = OTHER; note = 2-Prime-O-Methoxyethyl modified nucleoside
  modified_base order(7,9,11,13,15,17,22,24,26): mod_base = OTHER; note = 2-Prime-Fluoro modified nucleoside
  modified_base order(1..6,8,10,12,14,16,21,25): mod_base = OTHER; note = 2-Prime-O-Methyl modified nucleoside
  modified_base 1..26: mod_base = OTHER; note = Phosphorothioate linkage
  modified_base 20: mod_base = m5u; note = 5-methyluridine
  misc_feature 1..26: note = RM4442
cggtcaaacctctgaggactgggttc

SEQ ID NO: 7 - DNA, 24 bp, synthetic construct
  source 1..24: mol_type = other DNA
  misc_feature 19..20: note = DNA
  misc_feature order(1..18,21..24): note = RNA
  modified_base order(18,23): mod_base = OTHER; note = 2-Prime-O-Methoxyethyl modified nucleoside
  modified_base order(7,9,11,13,15,17,22,24): mod_base = OTHER; note = 2-Prime-Fluoro modified nucleoside
  modified_base order(1..6,8,10,12,14,16,21): mod_base = OTHER; note = 2-Prime-O-Methyl modified nucleoside
  modified_base 1..24: mod_base = OTHER; note = Phosphorothioate linkage
  modified_base 20: mod_base = m5u; note = 5-methyluridine
  misc_feature 1..24: note = RM4443
cggtcaaacctctgaggactgggt

SEQ ID NO: 8 - DNA, 30 bp, synthetic construct
  source 1..30: mol_type = other DNA
  misc_feature 17..18: note = DNA
  misc_feature order(1..16,19..30): note = RNA
  modified_base order(16,21): mod_base = OTHER; note = 2-Prime-O-Methoxyethyl modified nucleoside
  modified_base order(5,7,9,11,13,15,20,22,24,26,28): mod_base = OTHER; note = 2-Prime-Fluoro modified nucleoside
  modified_base order(1..4,6,8,10,12,14,19,23,25,27,29..30): mod_base = OTHER; note = 2-Prime-O-Methyl modified nucleoside
  modified_base 1..30: mod_base = OTHER; note = Phosphorothioate linkage
  modified_base 18: mod_base = m5u; note = 5-methyluridine
  misc_feature 1..30: note = RM4444
gtcaaacctctgaggactgggttcattttt

SEQ ID NO: 9 - DNA, 28 bp, synthetic construct
  source 1..28: mol_type = other DNA
  misc_feature 15..16: note = DNA
  misc_feature order(1..14,17..28): note = RNA
  modified_base order(14,19): mod_base = OTHER; note = 2-Prime-O-Methoxyethyl modified nucleoside
  modified_base order(3,5,7,9,11,13,18,20,22,24,26): mod_base = OTHER; note = 2-Prime-Fluoro modified nucleoside
  modified_base order(1..2,4,6,8,10,12,17,21,23,25,27..28): mod_base = OTHER; note = 2-Prime-O-Methyl modified nucleoside
  modified_base 1..28: mod_base = OTHER; note = Phosphorothioate linkage
  modified_base 16: mod_base = m5u; note = 5-methyluridine
  misc_feature 1..28: note = RM4445
caaacctctgaggactgggttcattttt

SEQ ID NO: 10 - DNA, 26 bp, synthetic construct
  source 1..26: mol_type = other DNA
  misc_feature 13..14: note = DNA
  misc_feature order(1..12,15..26): note = RNA
  modified_base order(12,17): mod_base = OTHER; note = 2-Prime-O-Methoxyethyl modified nucleoside
  modified_base order(1,3,5,7,9,11,16,18,20,22,24): mod_base = OTHER; note = 2-Prime-Fluoro modified nucleoside
  modified_base order(2,4,6,8,10,15,19,21,23,25..26): mod_base = OTHER; note = 2-Prime-O-Methyl modified nucleoside
  modified_base 1..26: mod_base = OTHER; note = Phosphorothioate linkage
  modified_base 14: mod_base = m5u; note = 5-methyluridine
  misc_feature 1..26: note = RM4446
aacctctgaggactgggttcattttt

SEQ ID NO: 11 - DNA, 24 bp, synthetic construct
  source 1..24: mol_type = other DNA
  misc_feature 11..12: note = DNA
  misc_feature order(1..10,13..24): note = RNA
  modified_base order(10,15): mod_base = OTHER; note = 2-Prime-O-Methoxyethyl modified nucleoside
  modified_base order(1,3,5,7,9,14,16,18,20,22): mod_base = OTHER; note = 2-Prime-Fluoro modified nucleoside
  modified_base order(2,4,6,8,13,17,19,21,23..24): mod_base = OTHER; note = 2-Prime-O-Methyl modified nucleoside
  modified_base 1..24: mod_base = OTHER; note = Phosphorothioate linkage
  modified_base 12: mod_base = m5u; note = 5-methyluridine
  misc_feature 1..24: note = RM4447
cctctgaggactgggttcattttt

SEQ ID NO: 12 - DNA, 22 bp, synthetic construct
  source 1..22: mol_type = other DNA
  misc_feature 9..10: note = DNA
  misc_feature order(1..8,11..22): note = RNA
  modified_base order(8,13): mod_base = OTHER; note = 2-Prime-O-Methoxyethyl modified nucleoside
  modified_base order(1,3,5,7,12,14,16,18,20): mod_base = OTHER; note = 2-Prime-Fluoro modified nucleoside
  modified_base order(2,4,6,11,15,17,19,21..22): mod_base = OTHER; note = 2-Prime-O-Methyl modified nucleoside
  modified_base 1..22: mod_base = OTHER; note = Phosphorothioate linkage
  modified_base 10: mod_base = m5u; note = 5-methyluridine
  misc_feature 1..22: note = RM4448
tctgaggactgggttcattttt

SEQ ID NO: 13 - DNA, 30 bp, synthetic construct
  source 1..30: mol_type = other DNA
  misc_feature 18..19: note = DNA
  misc_feature order(1..17,20..30): note = RNA
  modified_base order(17,22): mod_base = OTHER; note = 2-Prime-O-Methoxyethyl modified nucleoside
  modified_base order(6,8,10,12,14,16,21,23,25,27,29): mod_base = OTHER; note = 2-Prime-Fluoro modified nucleoside
  modified_base order(1..5,7,9,11,13,15,20,24,26,28,30): mod_base = OTHER; note = 2-Prime-O-Methyl modified nucleoside
  modified_base 1..30: mod_base = OTHER; note = Phosphorothioate linkage
  modified_base 19: mod_base = m5u; note = 5-methyluridine
  misc_feature 1..30: note = RM4449
ggtcaaacctctgaggactgggttcatttt

SEQ ID NO: 14 - DNA, 28 bp, synthetic construct
  source 1..28: mol_type = other DNA
  misc_feature 17..18: note = DNA
  misc_feature order(1..16,19..28): note = RNA
  modified_base order(16,21): mod_base = OTHER; note = 2-Prime-O-Methoxyethyl modified nucleoside
  modified_base order(5,7,9,11,13,15,20,22,24,26,28): mod_base = OTHER; note = 2-Prime-Fluoro modified nucleoside
  modified_base order(1..4,6,8,10,12,14,19,23,25,27): mod_base = OTHER; note = 2-Prime-O-Methyl modified nucleoside
  modified_base 1..28: mod_base = OTHER; note = Phosphorothioate linkage
  modified_base 18: mod_base = m5u; note = 5-methyluridine
  misc_feature 1..28: note = RM4450
gtcaaacctctgaggactgggttcattt

SEQ ID NO: 15 - DNA, 26 bp, synthetic construct
  source 1..26: mol_type = other DNA
  misc_feature 16..17: note = DNA
  misc_feature order(1..15,18..26): note = RNA
  modified_base order(15,20): mod_base = OTHER; note = 2-Prime-O-Methoxyethyl modified nucleoside
  modified_base order(4,6,8,10,12,14,19,21,23,25): mod_base = OTHER; note = 2-Prime-Fluoro modified nucleoside
  modified_base order(1..3,5,7,9,11,13,18,22,24,26): mod_base = OTHER; note = 2-Prime-O-Methyl modified nucleoside
  modified_base 1..26: mod_base = OTHER; note = Phosphorothioate linkage
  modified_base 17: mod_base = m5u; note = 5-methyluridine
  misc_feature 1..26: note = RM4451
tcaaacctctgaggactgggttcatt

SEQ ID NO: 16 - DNA, 24 bp, synthetic construct
  source 1..24: mol_type = other DNA
  misc_feature 15..16: note = DNA
  misc_feature order(1..14,17..24): note = RNA
  modified_base order(14,19): mod_base = OTHER; note = 2-Prime-O-Methoxyethyl modified nucleoside
  modified_base order(3,5,7,9,11,13,18,20,22,24): mod_base = OTHER; note = 2-Prime-Fluoro modified nucleoside
  modified_base order(1..2,4,6,8,10,12,17,21,23): mod_base = OTHER; note = 2-Prime-O-Methyl modified nucleoside
  modified_base 1..24: mod_base = OTHER; note = Phosphorothioate linkage
  modified_base 16: mod_base = m5u; note = 5-methyluridine
  misc_feature 1..24: note = RM4452
caaacctctgaggactgggttcat

SEQ ID NO: 17 - DNA, 22 bp, synthetic construct
  source 1..22: mol_type = other DNA
  misc_feature 14..15: note = DNA
  misc_feature order(1..13,16..22): note = RNA
  modified_base order(13,18): mod_base = OTHER; note = 2-Prime-O-Methoxyethyl modified nucleoside
  modified_base order(2,4,6,8,10,12,17,19,21): mod_base = OTHER; note = 2-Prime-Fluoro modified nucleoside
  modified_base order(1,3,5,7,9,11,16,20,22): mod_base = OTHER; note = 2-Prime-O-Methyl modified nucleoside
  modified_base 1..22: mod_base = OTHER; note = Phosphorothioate linkage
  modified_base 15: mod_base = m5u; note = 5-methyluridine
  misc_feature 1..22: note = RM4453
aaacctctgaggactgggttca

SEQ ID NO: 18 - DNA, 20 bp, synthetic construct
  source 1..20: mol_type = other DNA
  misc_feature 13..14: note = DNA
  misc_feature order(1..12,15..20): note = RNA
  modified_base order(12,17): mod_base = OTHER; note = 2-Prime-O-Methoxyethyl modified nucleoside
  modified_base order(1,3,5,7,9,11,16,18,20): mod_base = OTHER; note = 2-Prime-Fluoro modified nucleoside
  modified_base order(2,4,6,8,10,15,19): mod_base = OTHER; note = 2-Prime-O-Methyl modified nucleoside
  modified_base 1..20: mod_base = OTHER; note = Phosphorothioate linkage
  modified_base 14: mod_base = m5u; note = 5-methyluridine
  misc_feature 1..20: note = RM4454
aacctctgaggactgggttc

SEQ ID NO: 19 - DNA, 32 bp, synthetic construct
  source 1..32: mol_type = other DNA
  misc_feature 19..20: note = DNA
  misc_feature order(1..18,21..32): note = RNA
  modified_base order(2..3,18,23): mod_base = OTHER; note = 2-Prime-O-Methoxyethyl modified nucleoside
  modified_base order(1,5): mod_base = OTHER; note = 2-Prime-O-Methoxyethyl modified 5-methyl Cytidine
  modified_base 4: mod_base = OTHER; note = 2-Prime-O-Methoxyethyl modified 5-methyl Uridine
  modified_base 19: mod_base = OTHER; note = DNA nucleotide carrying a 6-amino-5-nitro-3-yl-2(1H)-pyridone nucleobase
  modified_base order(12..17,22,24..29): mod_base = OTHER; note = 2-Prime-Fluoro modified nucleoside
  modified_base order(6..11,21,30..32): mod_base = OTHER; note = 2-Prime-O-Methyl modified nucleoside
  modified_base order(1^2,31^32): mod_base = OTHER; note = (1,3-dimethylimidazolidin-2-ylidene) Phosphoramidate linkage
  modified_base order(6..18,19^20,22..31): mod_base = OTHER; note = Phosphorothioate linkage
  modified_base 20^21: mod_base = OTHER; note = Methylphosphonate linkage
  modified_base 20: mod_base = m5u; note = 5-methyluridine
  misc_feature 1..32: note = RM4826
cggtcaaacctctgaggantgggttcattttt

SEQ ID NO: 20 - DNA, 32 bp, synthetic construct; identical to SEQ ID NO: 19
  source 1..32: mol_type = other DNA
  misc_feature 19..20: note = DNA
  misc_feature order(1..18,21..32): note = RNA
  modified_base order(2..3,18,23): mod_base = OTHER; note = 2-Prime-O-Methoxyethyl modified nucleoside
  modified_base order(1,5): mod_base = OTHER; note = 2-Prime-O-Methoxyethyl modified 5-methyl Cytidine
  modified_base 4: mod_base = OTHER; note = 2-Prime-O-Methoxyethyl modified 5-methyl Uridine
  modified_base 19: mod_base = OTHER; note = DNA nucleotide carrying a 6-amino-5-nitro-3-yl-2(1H)-pyridone nucleobase
  modified_base order(13,15,17,22,24,26,28): mod_base = OTHER; note = 2-Prime-Fluoro modified nucleoside
  modified_base order(6..12,14,16,21,25,27,29..32): mod_base = OTHER; note = 2-Prime-O-Methyl modified nucleoside
  modified_base order(1^2,31^32): mod_base = OTHER; note = (1,3-dimethylimidazolidin-2-ylidene) Phosphoramidate linkage
  modified_base order(6..18,19^20,22..31): mod_base = OTHER; note = Phosphorothioate linkage
  modified_base 20^21: mod_base = OTHER; note = Methylphosphonate linkage
  modified_base 20: mod_base = m5u; note = 5-methyluridine
  misc_feature 1..32: note = RM4827

SEQ ID NO: 21 - DNA, 32 bp, synthetic construct; identical to SEQ ID NO: 19
  source 1..32: mol_type = other DNA
  misc_feature 19..20: note = DNA
  misc_feature order(1..18,21..32): note = RNA
  modified_base order(2..3,18,23): mod_base = OTHER; note = 2-Prime-O-Methoxyethyl modified nucleoside
  modified_base order(1,5): mod_base = OTHER; note = 2-Prime-O-Methoxyethyl modified 5-methyl Cytidine
  modified_base 4: mod_base = OTHER; note = 2-Prime-O-Methoxyethyl modified 5-methyl Uridine
  modified_base 19: mod_base = OTHER; note = DNA nucleotide carrying a 6-amino-5-nitro-3-yl-2(1H)-pyridone nucleobase
  modified_base order(12..17,22,24..29): mod_base = OTHER; note = 2-Prime-Fluoro modified nucleoside
  modified_base order(6..11,21,30..32): mod_base = OTHER; note = 2-Prime-O-Methyl modified nucleoside
  modified_base order(1^2,31^32): mod_base = OTHER; note = (1,3-dimethylimidazolidin-2-ylidene) Phosphoramidate linkage
  modified_base order(6..20,21..31): mod_base = OTHER; note = Phosphorothioate linkage
  modified_base 20^21: mod_base = OTHER; note = Methylphosphonate linkage
  modified_base 20: mod_base = m5u; note = 5-methyluridine
  misc_feature 1..32: note = RM4828

SEQ ID NO: 22 - DNA, 32 bp, synthetic construct; identical to SEQ ID NO: 19
  source 1..32: mol_type = other DNA
  misc_feature 19..20: note = DNA
  misc_feature order(1..18,21..32): note = RNA
  modified_base order(2..3,18,23): mod_base = OTHER; note = 2-Prime-O-Methoxyethyl modified nucleoside
  modified_base order(1,5): mod_base = OTHER; note = 2-Prime-O-Methoxyethyl modified 5-methyl Cytidine
  modified_base 4: mod_base = OTHER; note = 2-Prime-O-Methoxyethyl modified 5-methyl Uridine
  modified_base 19: mod_base = OTHER; note = DNA nucleotide carrying a 6-amino-5-nitro-3-yl-2(1H)-pyridone nucleobase
  modified_base order(13,15,17,22,24,26,28): mod_base = OTHER; note = 2-Prime-Fluoro modified nucleoside
  modified_base order(6..12,14,16,21,25,27,29..32): mod_base = OTHER; note = 2-Prime-O-Methyl modified nucleoside
  modified_base order(1^2,31^32): mod_base = OTHER; note = (1,3-dimethylimidazolidin-2-ylidene) Phosphoramidate linkage
  modified_base order(6..20,21..31): mod_base = OTHER; note = Phosphorothioate linkage
  modified_base 20^21: mod_base = OTHER; note = Methylphosphonate linkage
  modified_base 20: mod_base = m5u; note = 5-methyluridine
  misc_feature 1..32: note = RM4829

SEQ ID NO: 23 - DNA, 30 bp, synthetic construct
  source 1..30: mol_type = other DNA
  misc_feature 17..18: note = DNA
  misc_feature order(1..16,19..30): note = RNA
  modified_base order(1,4..5,16,21): mod_base = OTHER; note = 2-Prime-O-Methoxyethyl modified nucleoside
  modified_base 3: mod_base = OTHER; note = 2-Prime-O-Methoxyethyl modified 5-methyl Cytidine
  modified_base 2: mod_base = OTHER; note = 2-Prime-O-Methoxyethyl modified 5-methyl Uridine
  modified_base 17: mod_base = OTHER; note = DNA nucleotide carrying a 6-amino-5-nitro-3-yl-2(1H)-pyridone nucleobase
  modified_base order(10..15,20,22..27): mod_base = OTHER; note = 2-Prime-Fluoro modified nucleoside
  modified_base order(6..9,19,28..30): mod_base = OTHER; note = 2-Prime-O-Methyl modified nucleoside
  modified_base order(1^2,29^30): mod_base = OTHER; note = (1,3-dimethylimidazolidin-2-ylidene) Phosphoramidate linkage
  modified_base order(6..16,17^18,20..29): mod_base = OTHER; note = Phosphorothioate linkage
  modified_base 18^19: mod_base = OTHER; note = Methylphosphonate linkage
  modified_base 18: mod_base = m5u; note = 5-methyluridine
  misc_feature 1..30: note = RM4830
gtcaaacctctgaggantgggttcattttt

SEQ ID NO: 24 - DNA, 30 bp, synthetic construct; identical to SEQ ID NO: 23
  source 1..30: mol_type = other DNA
  misc_feature 17..18: note = DNA
  misc_feature order(1..16,19..30): note = RNA
  modified_base order(1,4..5,16,21): mod_base = OTHER; note = 2-Prime-O-Methoxyethyl modified nucleoside
  modified_base 3: mod_base = OTHER; note = 2-Prime-O-Methoxyethyl modified 5-methyl Cytidine
  modified_base 2: mod_base = OTHER; note = 2-Prime-O-Methoxyethyl modified 5-methyl Uridine
  modified_base 17: mod_base = OTHER; note = DNA nucleotide carrying a 6-amino-5-nitro-3-yl-2(1H)-pyridone nucleobase
  modified_base order(11,13,15,20,22,24,26): mod_base = OTHER; note = 2-Prime-Fluoro modified nucleoside
  modified_base order(6..10,12,14,19,23,25,27..30): mod_base = OTHER; note = 2-Prime-O-Methyl modified nucleoside
  modified_base order(1^2,29^30): mod_base = OTHER; note = (1,3-dimethylimidazolidin-2-ylidene) Phosphoramidate linkage
  modified_base order(6..16,17^18,20..29): mod_base = OTHER; note = Phosphorothioate linkage
  modified_base 18^19: mod_base = OTHER; note = Methylphosphonate linkage
  modified_base 18: mod_base = m5u; note = 5-methyluridine
  misc_feature 1..30: note = RM4831

SEQ ID NO: 25 - DNA, 30 bp, synthetic construct; identical to SEQ ID NO: 23
  source 1..30: mol_type = other DNA
  misc_feature 17..18: note = DNA
  misc_feature order(1..16,19..30): note = RNA
  modified_base order(1,4..5,16,21): mod_base = OTHER; note = 2-Prime-O-Methoxyethyl modified nucleoside
  modified_base 3: mod_base = OTHER; note = 2-Prime-O-Methoxyethyl modified 5-methyl Cytidine
  modified_base 2: mod_base = OTHER; note = 2-Prime-O-Methoxyethyl modified 5-methyl Uridine
  modified_base 17: mod_base = OTHER; note = DNA nucleotide carrying a 6-amino-5-nitro-3-yl-2(1H)-pyridone nucleobase
  modified_base order(10..15,20,22..27): mod_base = OTHER; note = 2-Prime-Fluoro modified nucleoside
  modified_base order(6..9,19,28..30): mod_base = OTHER; note = 2-Prime-O-Methyl modified nucleoside
  modified_base order(1^2,29^30): mod_base = OTHER; note = (1,3-dimethylimidazolidin-2-ylidene) Phosphoramidate linkage
  modified_base order(6..18,19..29): mod_base = OTHER; note = Phosphorothioate linkage
  modified_base 18^19: mod_base = OTHER; note = Methylphosphonate linkage
  modified_base 18: mod_base = m5u; note = 5-methyluridine
  misc_feature 1..30: note = RM4832

SEQ ID NO: 26 - DNA, 30 bp, synthetic construct; identical to SEQ ID NO: 23
  source 1..30: mol_type = other DNA
  misc_feature 17..18: note = DNA
  misc_feature order(1..16,19..30): note = RNA
  modified_base order(1,4..5,16,21): mod_base = OTHER; note = 2-Prime-O-Methoxyethyl modified nucleoside
  modified_base 3: mod_base = OTHER; note = 2-Prime-O-Methoxyethyl modified 5-methyl Cytidine
  modified_base 2: mod_base = OTHER; note = 2-Prime-O-Methoxyethyl modified 5-methyl Uridine
  modified_base 17: mod_base = OTHER; note = DNA nucleotide carrying a 6-amino-5-nitro-3-yl-2(1H)-pyridone nucleobase
  modified_base order(11,13,15,20,22,24,26): mod_base = OTHER; note = 2-Prime-Fluoro modified nucleoside
  modified_base order(6..10,12,14,19,23,25,27..30): mod_base = OTHER; note = 2-Prime-O-Methyl modified nucleoside
  modified_base order(1^2,29^30): mod_base = OTHER; note = (1,3-dimethylimidazolidin-2-ylidene) Phosphoramidate linkage
  modified_base order(6..18,19..29): mod_base = OTHER; note = Phosphorothioate linkage
  modified_base 18^19: mod_base = OTHER; note = Methylphosphonate linkage
  modified_base 18: mod_base = m5u; note = 5-methyluridine
  misc_feature 1..30: note = RM4833

SEQ ID NO: 27 - DNA, 28 bp, synthetic construct
  source 1..28: mol_type = other DNA
  misc_feature 15..16: note = DNA
  misc_feature order(1..14,17..28): note = RNA
  modified_base order(2..4,14,19): mod_base = OTHER; note = 2-Prime-O-Methoxyethyl modified nucleoside
  modified_base order(1,5): mod_base = OTHER; note = 2-Prime-O-Methoxyethyl modified 5-methyl Cytidine
  modified_base 15: mod_base = OTHER; note = DNA nucleotide carrying a 6-amino-5-nitro-3-yl-2(1H)-pyridone nucleobase
  modified_base order(8..13,18,20..25): mod_base = OTHER; note = 2-Prime-Fluoro modified nucleoside
  modified_base order(6..7,17,26..28): mod_base = OTHER; note = 2-Prime-O-Methyl modified nucleoside
  modified_base order(1^2,27^28): mod_base = OTHER; note = (1,3-dimethylimidazolidin-2-ylidene) Phosphoramidate linkage
  modified_base order(6..14,15^16,18..27): mod_base = OTHER; note = Phosphorothioate linkage
  modified_base 16^17: mod_base = OTHER; note = Methylphosphonate linkage
  modified_base 16: mod_base = m5u; note = 5-methyluridine
  misc_feature 1..28: note = RM4834
caaacctctgaggantgggttcattttt

SEQ ID NO: 28 - DNA, 28 bp, synthetic construct
  source 1..28: mol_type = other DNA
  misc_feature 15..16: note = DNA
  misc_feature order(1..14,17..28): note = RNA
  modified_base order(2..4,14,19): mod_base = OTHER; note = 2-Prime-O-Methoxyethyl modified nucleoside
  modified_base order(1,5): mod_base = OTHER; note = 2-Prime-O-Methoxyethyl modified 5-methyl Cytidine
  modified_base 15: mod_base = OTHER; note = DNA nucleotide carrying a 6-amino-5-nitro-3-yl-2(1H)-pyridone nucleobase
  modified_base order(9,11,13,18,20,22,24): mod_base = OTHER; note = 2-Prime-Fluoro modified nucleoside
  modified_base order(6..8,10,12,17,21,23,25..28): mod_base = OTHER; note = 2-Prime-O-Methyl modified nucleoside
  modified_base order(1^2,27^28): mod_base = OTHER; note = (1,3-dimethylimidazolidin-2-ylidene) Phosphoramidate linkage
  modified_base order(6..14,15^16,18..27): mod_base = OTHER; note = Phosphorothioate linkage
  modified_base 16^17: mod_base = OTHER; note = Methylphosphonate linkage
  modified_base 16: mod_base = m5u; note = 5-methyluridine
  misc_feature 1..28: note = RM4835
caaacctctgaggantgggttcattttt

SEQ ID NO: 29 - DNA, 28 bp, synthetic construct
  source 1..28: mol_type = other DNA
  misc_feature 15..16: note = DNA
  misc_feature order(1..14,17..28): note = RNA
  modified_base order(2..4,14,19): mod_base = OTHER; note = 2-Prime-O-Methoxyethyl modified nucleoside
  modified_base order(1,5): mod_base = OTHER; note = 2-Prime-O-Methoxyethyl modified 5-methyl Cytidine
  modified_base 15: mod_base = OTHER; note = DNA nucleotide carrying a 6-amino-5-nitro-3-yl-2(1H)-pyridone nucleobase
  modified_base order(8..13,18,20..25): mod_base = OTHER; note = 2-Prime-Fluoro modified nucleoside
  modified_base order(6..7,17,26..28): mod_base = OTHER; note = 2-Prime-O-Methyl modified nucleoside
  modified_base order(1^2,27^28): mod_base = OTHER; note = (1,3-dimethylimidazolidin-2-ylidene) Phosphoramidate linkage
  modified_base order(6..16,17..27): mod_base = OTHER; note = Phosphorothioate linkage
  modified_base 16^17: mod_base = OTHER; note = Methylphosphonate linkage
  modified_base 16: mod_base = m5u; note = 5-methyluridine
  misc_feature 1..28: note = RM4836
caaacctctgaggantgggttcattttt

SEQ ID NO: 30 - DNA, 28 bp, synthetic construct
  source 1..28: mol_type = other DNA
  misc_feature 15..16: note = DNA
  misc_feature order(1..14,17..28): note = RNA
  modified_base order(2..4,14,19): mod_base = OTHER; note = 2-Prime-O-Methoxyethyl modified nucleoside
  modified_base order(1,5): mod_base = OTHER; note = 2-Prime-O-Methoxyethyl modified 5-methyl Cytidine
  modified_base 15: mod_base = OTHER; note = DNA nucleotide carrying a 6-amino-5-nitro-3-yl-2(1H)-pyridone nucleobase
  modified_base order(9,11,13,18,20,22,24): mod_base = OTHER; note = 2-Prime-Fluoro modified nucleoside
  modified_base order(6..8,10,12,17,21,23,25..28): mod_base = OTHER; note = 2-Prime-O-Methyl modified nucleoside
  modified_base order(1^2,27^28): mod_base = OTHER; note = (1,3-dimethylimidazolidin-2-ylidene) Phosphoramidate linkage
  modified_base order(6..16,17..27): mod_base = OTHER; note = Phosphorothioate linkage
  modified_base 16^17: mod_base = OTHER; note = Methylphosphonate linkage
  modified_base 16: mod_base = m5u; note = 5-methyluridine
  misc_feature 1..28: note = RM4837
caaacctctgaggantgggttcattttt

SEQ ID NO: 31 - DNA, 26 bp, synthetic construct
  source 1..26: mol_type = other DNA
  misc_feature 13..14: note = DNA
  misc_feature order(1..12,15..26): note = RNA
  modified_base order(1..2,12,17): mod_base = OTHER; note = 2-Prime-O-Methoxyethyl modified nucleoside
  modified_base 3: mod_base = OTHER; note = 2-Prime-O-Methoxyethyl modified 5-methyl Cytidine
  modified_base 13: mod_base = OTHER; note = DNA nucleotide carrying a 6-amino-5-nitro-3-yl-2(1H)-pyridone nucleobase
  modified_base order(6..11,16,18..23): mod_base = OTHER; note = 2-Prime-Fluoro modified nucleoside
  modified_base order(4..5,15,24..26): mod_base = OTHER; note = 2-Prime-O-Methyl modified nucleoside
  modified_base order(1^2,25^26): mod_base = OTHER; note = (1,3-dimethylimidazolidin-2-ylidene) Phosphoramidate linkage
  modified_base order(4..12,13^14,16..25): mod_base = OTHER; note = Phosphorothioate linkage
  modified_base 14^15: mod_base = OTHER; note = Methylphosphonate linkage
  modified_base 14: mod_base = m5u; note = 5-methyluridine
  misc_feature 1..26: note = RM4838
aacctctgaggantgggttcattttt

SEQ ID NO: 32 - DNA, 26 bp, synthetic construct
  source 1..26: mol_type = other DNA
  misc_feature 13..14: note = DNA
  misc_feature order(1..12,15..26): note = RNA
  modified_base order(1..2,12,17): mod_base = OTHER; note = 2-Prime-O-Methoxyethyl modified nucleoside
  modified_base 3: mod_base = OTHER; note = 2-Prime-O-Methoxyethyl modified 5-methyl Cytidine
  modified_base 13: mod_base = OTHER; note = DNA nucleotide carrying a 6-amino-5-nitro-3-yl-2(1H)-pyridone nucleobase
  modified_base order(7,9,11,16,18,20,22): mod_base = OTHER; note = 2-Prime-Fluoro modified nucleoside
  modified_base order(4..6,8,10,15,19,21,23..26): mod_base = OTHER; note = 2-Prime-O-Methyl modified nucleoside
  modified_base order(1^2,25^26): mod_base = OTHER; note = (1,3-dimethylimidazolidin-2-ylidene) Phosphoramidate linkage
  modified_base order(4..12,13^14,16..25): mod_base = OTHER; note = Phosphorothioate linkage
  modified_base 14^15: mod_base = OTHER; note = Methylphosphonate linkage
  modified_base 14: mod_base = m5u; note = 5-methyluridine
  misc_feature 1..26: note = RM4839
aacctctgaggantgggttcattttt

SEQ ID NO: 33 - DNA, 26 bp, synthetic construct
  source 1..26: mol_type = other DNA
  misc_feature 13..14: note = DNA
  misc_feature order(1..12,15..26): note = RNA
  modified_base order(1..2,12,17): mod_base = OTHER; note = 2-Prime-O-Methoxyethyl modified nucleoside
  modified_base 3: mod_base = OTHER; note = 2-Prime-O-Methoxyethyl modified 5-methyl Cytidine
  modified_base 13: mod_base = OTHER; note = DNA nucleotide carrying a 6-amino-5-nitro-3-yl-2(1H)-pyridone nucleobase
  modified_base order(6..11,16,18..23): mod_base = OTHER; note = 2-Prime-Fluoro modified nucleoside
  modified_base order(4..5,15,24..26): mod_base = OTHER; note = 2-Prime-O-Methyl modified nucleoside
  modified_base order(1^2,25^26): mod_base = OTHER; note = (1,3-dimethylimidazolidin-2-ylidene) Phosphoramidate linkage
  modified_base order(4..14,15..25): mod_base = OTHER; note = Phosphorothioate linkage
  modified_base 14^15: mod_base = OTHER; note = Methylphosphonate linkage
  modified_base 14: mod_base = m5u; note = 5-methyluridine
  misc_feature 1..26: note = RM4840
aacctctgaggantgggttcattttt

SEQ ID NO: 34 - DNA, 26 bp, synthetic construct
  source 1..26: mol_type = other DNA
  misc_feature 13..14: note = DNA
  misc_feature order(1..12,15..26): note = RNA
  modified_base order(1..2,12,17): mod_base = OTHER; note = 2-Prime-O-Methoxyethyl modified nucleoside
  modified_base 3: mod_base = OTHER; note = 2-Prime-O-Methoxyethyl modified 5-methyl Cytidine
  modified_base 13: mod_base = OTHER; note = DNA nucleotide carrying a 6-amino-5-nitro-3-yl-2(1H)-pyridone nucleobase
  modified_base order(7,9,11,16,18,20,22): mod_base = OTHER; note = 2-Prime-Fluoro modified nucleoside
  modified_base order(4..6,8,10,15,19,21,23..26): mod_base = OTHER; note = 2-Prime-O-Methyl modified nucleoside
  modified_base order(1^2,25^26): mod_base = OTHER; note = (1,3-dimethylimidazolidin-2-ylidene) Phosphoramidate linkage
  modified_base order(4..14,15..25): mod_base = OTHER; note = Phosphorothioate linkage
  modified_base 14^15: mod_base = OTHER; note = Methylphosphonate linkage
  modified_base 14: mod_base = m5u; note = 5-methyluridine
  misc_feature 1..26: note = RM4841
aacctctgaggantgggttcattttt

SEQ ID NO: 35 - DNA, 30 bp, synthetic construct
  source 1..30: mol_type = other DNA
  misc_feature 19..20: note = DNA
  misc_feature order(1..18,21..30): note = RNA
  modified_base order(2..3,18,23): mod_base = OTHER; note = 2-Prime-O-Methoxyethyl modified nucleoside
  modified_base order(1,5): mod_base = OTHER; note = 2-Prime-O-Methoxyethyl modified 5-methyl Cytidine
  modified_base 4: mod_base = OTHER; note = 2-Prime-O-Methoxyethyl modified 5-methyl Uridine
  modified_base 19: mod_base = OTHER; note = DNA nucleotide carrying a 6-amino-5-nitro-3-yl-2(1H)-pyridone nucleobase
  modified_base order(12..17,22,24..29): mod_base = OTHER; note = 2-Prime-Fluoro modified nucleoside
  modified_base order(6..11,21,30): mod_base = OTHER; note = 2-Prime-O-Methyl modified nucleoside
  modified_base order(1^2,29^30): mod_base = OTHER; note = (1,3-dimethylimidazolidin-2-ylidene) Phosphoramidate linkage
  modified_base order(6..18,19^20,22..29): mod_base = OTHER; note = Phosphorothioate linkage
  modified_base 20^21: mod_base = OTHER; note = Methylphosphonate linkage
  modified_base 20: mod_base = m5u; note = 5-methyluridine
  misc_feature 1..30: note = RM4842
cggtcaaacctctgaggantgggttcattt

SEQ ID NO: 36 - DNA, 30 bp, synthetic construct; identical to SEQ ID NO: 35
  source 1..30: mol_type = other DNA
  misc_feature 19..20: note = DNA
  misc_feature order(1..18,21..30): note = RNA
  modified_base order(2..3,18,23): mod_base = OTHER; note = 2-Prime-O-Methoxyethyl modified nucleoside
  modified_base order(1,5): mod_base = OTHER; note = 2-Prime-O-Methoxyethyl modified 5-methyl Cytidine
  modified_base 4: mod_base = OTHER; note = 2-Prime-O-Methoxyethyl modified 5-methyl Uridine
  modified_base 19: mod_base = OTHER; note = DNA nucleotide carrying a 6-amino-5-nitro-3-yl-2(1H)-pyridone nucleobase
  modified_base order(13,15,17,22,24,26,28): mod_base = OTHER; note = 2-Prime-Fluoro modified nucleoside
  modified_base order(6..12,14,16,21,25,27,29..30): mod_base = OTHER; note = 2-Prime-O-Methyl modified nucleoside
  modified_base order(1^2,29^30): mod_base = OTHER; note = (1,3-dimethylimidazolidin-2-ylidene) Phosphoramidate linkage
  modified_base order(6..18,19^20,22..29): mod_base = OTHER; note = Phosphorothioate linkage
  modified_base 20^21: mod_base = OTHER; note = Methylphosphonate linkage
  modified_base 20: mod_base = m5u; note = 5-methyluridine
  misc_feature 1..30: note = RM4843

SEQ ID NO: 37 - DNA, 30 bp, synthetic construct; identical to SEQ ID NO: 35
  source 1..30: mol_type = other DNA
  misc_feature 19..20: note = DNA
  misc_feature order(1..18,21..30): note = RNA
  modified_base order(2..3,18,23): mod_base = OTHER; note = 2-Prime-O-Methoxyethyl modified nucleoside
  modified_base order(1,5): mod_base = OTHER; note = 2-Prime-O-Methoxyethyl modified 5-methyl Cytidine
  modified_base 4: mod_base = OTHER; note = 2-Prime-O-Methoxyethyl modified 5-methyl Uridine
  modified_base 19: mod_base = OTHER; note = DNA nucleotide carrying a 6-amino-5-nitro-3-yl-2(1H)-pyridone nucleobase
  modified_base order(12..17,22,24..29): mod_base = OTHER; note = 2-Prime-Fluoro modified nucleoside
  modified_base order(6..11,21,30): mod_base = OTHER; note = 2-Prime-O-Methyl modified nucleoside
  modified_base order(1^2,29^30): mod_base = OTHER; note = (1,3-dimethylimidazolidin-2-ylidene) Phosphoramidate linkage
  modified_base order(6..20,21..29): mod_base = OTHER; note = Phosphorothioate linkage
  modified_base 20^21: mod_base = OTHER; note = Methylphosphonate linkage
  modified_base 20: mod_base = m5u; note = 5-methyluridine
  misc_feature 1..30: note = RM4844

SEQ ID NO: 38 - DNA, 30 bp, synthetic construct; identical to SEQ ID NO: 35
  source 1..30: mol_type = other DNA
  misc_feature 19..20: note = DNA
  misc_feature order(1..18,21..30): note = RNA
  modified_base order(2..3,18,23): mod_base = OTHER; note = 2-Prime-O-Methoxyethyl modified nucleoside
  modified_base order(1,5): mod_base = OTHER; note = 2-Prime-O-Methoxyethyl modified 5-methyl Cytidine
  modified_base 4: mod_base = OTHER; note = 2-Prime-O-Methoxyethyl modified 5-methyl Uridine
  modified_base 19: mod_base = OTHER; note = DNA nucleotide carrying a 6-amino-5-nitro-3-yl-2(1H)-pyridone nucleobase
  modified_base order(13,15,17,22,24,26,28): mod_base = OTHER; note = 2-Prime-Fluoro modified nucleoside
  modified_base order(6..12,14,16,21,25,27,29..30): mod_base = OTHER; note = 2-Prime-O-Methyl modified nucleoside
  modified_base order(1^2,29^30): mod_base = OTHER; note = (1,3-dimethylimidazolidin-2-ylidene) Phosphoramidate linkage
  modified_base order(6..20,21..29): mod_base = OTHER; note = Phosphorothioate linkage
  modified_base 20^21: mod_base = OTHER; note = Methylphosphonate linkage
  modified_base 20: mod_base = m5u; note = 5-methyluridine
  misc_feature 1..30: note = RM4845

SEQ ID NO: 39 - DNA, 28 bp, synthetic construct
  source 1..28: mol_type = other DNA
  misc_feature 19..20: note = DNA
  misc_feature order(1..18,21..28): note = RNA
  modified_base order(2..3,18,23): mod_base = OTHER; note = 2-Prime-O-Methoxyethyl modified nucleoside
  modified_base order(1,5): mod_base = OTHER; note = 2-Prime-O-Methoxyethyl modified 5-methyl Cytidine
  modified_base 4: mod_base = OTHER; note = 2-Prime-O-Methoxyethyl modified 5-methyl Uridine
  modified_base 19: mod_base = OTHER; note = DNA nucleotide carrying a 6-amino-5-nitro-3-yl-2(1H)-pyridone nucleobase
  modified_base order(12..17,22,24..28): mod_base = OTHER; note = 2-Prime-Fluoro modified nucleoside
  modified_base order(6..11,21): mod_base = OTHER; note = 2-Prime-O-Methyl modified nucleoside
  modified_base order(1^2,27^28): mod_base = OTHER; note = (1,3-dimethylimidazolidin-2-ylidene) Phosphoramidate linkage
  modified_base order(6..18,19^20,22..27): mod_base = OTHER; note = Phosphorothioate linkage
  modified_base 20^21: mod_base = OTHER; note = Methylphosphonate linkage
  modified_base 20: mod_base = m5u; note = 5-methyluridine
  misc_feature 1..28: note = RM4846
cggtcaaacctctgaggantgggttcat

SEQ ID NO: 40 - DNA, 28 bp, synthetic construct
  source 1..28: mol_type = other DNA
  misc_feature 19..20: note = DNA
  misc_feature order(1..18,21..28): note = RNA
  modified_base order(2..3,18,23): mod_base = OTHER; note = 2-Prime-O-Methoxyethyl modified nucleoside
  modified_base order(1,5): mod_base = OTHER; note = 2-Prime-O-Methoxyethyl modified 5-methyl Cytidine
  modified_base 4: mod_base = OTHER; note = 2-Prime-O-Methoxyethyl modified 5-methyl Uridine
  modified_base 19: mod_base = OTHER; note = DNA nucleotide carrying a 6-amino-5-nitro-3-yl-2(1H)-pyridone nucleobase
  modified_base order(13,15,17,22,24,26,28): mod_base = OTHER; note = 2-Prime-Fluoro modified nucleoside
  modified_base order(6..12,14,16,21,25,27): mod_base = OTHER; note = 2-Prime-O-Methyl modified nucleoside
  modified_base order(1^2,27^28): mod_base = OTHER; note = (1,3-dimethylimidazolidin-2-ylidene) Phosphoramidate linkage
  modified_base order(6..18,19^20,22..27): mod_base = OTHER; note = Phosphorothioate linkage
  modified_base 20^21: mod_base = OTHER; note = Methylphosphonate linkage
  modified_base 20: mod_base = m5u; note = 5-methyluridine
  misc_feature 1..28: note = RM4847
cggtcaaacctctgaggantgggttcat

SEQ ID NO: 41 - DNA, 28 bp, synthetic construct
  source 1..28: mol_type = other DNA
  misc_feature 19..20: note = DNA
  misc_feature order(1..18,21..28): note = RNA
  modified_base order(2..3,18,23): mod_base = OTHER; note = 2-Prime-O-Methoxyethyl modified nucleoside
  modified_base order(1,5): mod_base = OTHER; note = 2-Prime-O-Methoxyethyl modified 5-methyl Cytidine
  modified_base 4: mod_base = OTHER; note = 2-Prime-O-Methoxyethyl modified 5-methyl Uridine
  modified_base 19: mod_base = OTHER; note = DNA nucleotide carrying a 6-amino-5-nitro-3-yl-2(1H)-pyridone nucleobase
  modified_base order(12..17,22,24..28): mod_base = OTHER; note = 2-Prime-Fluoro modified nucleoside
  modified_base order(6..11,21): mod_base = OTHER; note = 2-Prime-O-Methyl modified nucleoside
  modified_base order(1^2,27^28): mod_base = OTHER; note = (1,3-dimethylimidazolidin-2-ylidene) Phosphoramidate linkage
  modified_base order(6..20,21..27): mod_base = OTHER; note = Phosphorothioate linkage
  modified_base 20^21: mod_base = OTHER; note = Methylphosphonate linkage
  modified_base 20: mod_base = m5u; note = 5-methyluridine
  misc_feature 1..28: note = RM4848
cggtcaaacctctgaggantgggttcat

SEQ ID NO: 42 - DNA, 28 bp, synthetic construct
  source 1..28: mol_type = other DNA
  misc_feature 19..20: note = DNA
  misc_feature order(1..18,21..28): note = RNA
  modified_base order(2..3,18,23): mod_base = OTHER; note = 2-Prime-O-Methoxyethyl modified nucleoside
  modified_base order(1,5): mod_base = OTHER; note = 2-Prime-O-Methoxyethyl modified 5-methyl Cytidine
  modified_base 4: mod_base = OTHER; note = 2-Prime-O-Methoxyethyl modified 5-methyl Uridine
  modified_base 19: mod_base = OTHER; note = DNA nucleotide carrying a 6-amino-5-nitro-3-yl-2(1H)-pyridone nucleobase
  modified_base order(13,15,17,22,24,26,28): mod_base = OTHER; note = 2-Prime-Fluoro modified nucleoside
  modified_base order(6..12,14,16,21,25,27): mod_base = OTHER; note = 2-Prime-O-Methyl modified nucleoside
  modified_base order(1^2,27^28): mod_base = OTHER; note = (1,3-dimethylimidazolidin-2-ylidene) Phosphoramidate linkage
  modified_base order(6..20,21..27): mod_base = OTHER; note = Phosphorothioate linkage
  modified_base 20^21: mod_base = OTHER; note = Methylphosphonate linkage
  modified_base 20: mod_base = m5u; note = 5-methyluridine
  misc_feature 1..28: note = RM4849
cggtcaaacctctgaggantgggttcat

SEQ ID NO: 43 - DNA, 20 bp, synthetic construct
  source 1..20: mol_type = other DNA
ctcgacgcaagccataacac

SEQ ID NO: 44 - DNA, 20 bp, synthetic construct
  source 1..20: mol_type = other DNA
tggaccgactggaaacgtag

SEQ ID NO: 45 - DNA, 250 bp, synthetic construct
  source 1..250: mol_type = other DNA
tctggctcgacgcaagccataacactaatacgactcactatagggttagtttttagaggcatgtctatatctcgcccaaatgctgtggtcgggaggtgtcgcatgatccgccactcaagagacaagaaaaatgaacccaatcctcagaggtttgaccgaattgcacacacaaaggagacaatgctctctgatggtttgaactcactcacctaccaggtgctggattacgtttccagtcggtccacgtttg

SEQ ID NO: 46 - DNA, 20 bp, synthetic construct
  source 1..20: mol_type = other DNA
tccgccactcaagagacaag

SEQ ID NO: 47 - DNA, 20 bp, synthetic construct
  source 1..20: mol_type = other DNA
gcacctggtaggtgagtgag

SEQ ID NO: 48 - DNA, 20 bp, synthetic construct
  source 1..20: mol_type = other DNA
cccgctagcaacttgacctc

SEQ ID NO: 49 - DNA, 20 bp, synthetic construct
  source 1..20: mol_type = other DNA
ccaggtccacaggcatgtta

SEQ ID NO: 50 - DNA, 20 bp, synthetic construct
  source 1..20: mol_type = other DNA
attattggggctggggagga

SEQ ID NO: 51 - DNA, 20 bp, synthetic construct
  source 1..20: mol_type = other DNA
agcacctggtaggtgagtga

SEQ ID NO: 52 - DNA, 20 bp, synthetic construct
  source 1..20: mol_type = other DNA
cctggcgtcgtgattagtga

SEQ ID NO: 53 - DNA, 20 bp, synthetic construct
  source 1..20: mol_type = other DNA
cgagcaagacgttcagtcct

SEQ ID NO: 54 - DNA, 17 bp, synthetic construct
  source 1..17: mol_type = other DNA
  modified_base order(7..9,16): mod_base = OTHER; note = Locked Nucleic Acid
gaacccagtcctcagag

SEQ ID NO: 55 - DNA, 19 bp, synthetic construct
  source 1..19: mol_type = other DNA
  modified_base order(2,5,9..11,18): mod_base = OTHER; note = Locked Nucleic Acid
atgaacccaatcctcagag

SEQ ID NO: 56 - DNA, 20 bp, synthetic construct
  source 1..20: mol_type = other DNA
aggagtccccgctgcttgtg

SEQ ID NO: 57 - DNA, 25 bp, synthetic construct
  source 1..25: mol_type = other DNA
  modified_base order(3,9,14,21,23): mod_base = OTHER; note = Locked Nucleic Acid
gatgacatttttaacaggtttgacc

SEQ ID NO: 58 - DNA, 22 bp, synthetic construct
  source 1..22: mol_type = other DNA
  modified_base 3: mod_base = OTHER; note = Locked Nucleic Acid
gctgaggatttggaaagggtgt

SEQ ID NO: 59 - DNA, 30 bp, synthetic construct
  source 1..30: mol_type = other DNA
  misc_feature 25..26: note = DNA
  misc_feature order(1..24,27..30): note = RNA
  modified_base order(1..15,24): mod_base = OTHER; note = 2-Prime-Fluoro modified nucleoside
  modified_base order(16..23,27..30): mod_base = OTHER; note = 2-Prime-O-Methyl modified nucleoside
  modified_base order(1^2,16^17,26^27,29^30): mod_base = OTHER; note = (1,3-dimethylimidazolidin-2-ylidene) Phosphoramidate linkage
  modified_base order(2..16,17..26,27..29): mod_base = OTHER; note = Phosphorothioate linkage
  modified_base 26: mod_base = m5u; note = 5-methyluridine
gcaattcggtcaaacctctgaggactgggt

SEQ ID NO: 60 - DNA, 30 bp, synthetic construct
  source 1..30: mol_type = other DNA
  misc_feature 25..26: note = DNA
  misc_feature order(1..24,27..30): note = RNA
  modified_base 25: mod_base = OTHER; note = DNA nucleotide carrying a 6-amino-5-nitro-3-yl-2(1H)-pyridone nucleobase
  modified_base order(1..15,24): mod_base = OTHER; note = 2-Prime-Fluoro modified nucleoside
  modified_base order(16..23,27..30): mod_base = OTHER; note = 2-Prime-O-Methyl modified nucleoside
  modified_base order(1^2,16^17,26^27,29^30): mod_base = OTHER; note = (1,3-dimethylimidazolidin-2-ylidene) Phosphoramidate linkage
  modified_base order(2..16,17..26,27..29): mod_base = OTHER; note = Phosphorothioate linkage
  modified_base 26: mod_base = m5u; note = 5-methyluridine
gcaattcggtcaaacctctgaggantgggt

SEQ ID NO: 61 - DNA, 30 bp, synthetic construct; identical to SEQ ID NO: 59
  source 1..30: mol_type = other DNA
  misc_feature 26: note = DNA
  misc_feature order(1..25,27..30): note = RNA
  modified_base order(1..15,24): mod_base = OTHER; note = 2-Prime-Fluoro modified nucleoside
  modified_base order(16..23,27..30): mod_base = OTHER; note = 2-Prime-O-Methyl modified nucleoside
  modified_base 25: mod_base = OTHER; note = 2-Prime-2-Prime-Difluoro modified nucleoside
  modified_base order(1^2,16^17,26^27,29^30): mod_base = OTHER; note = (1,3-dimethylimidazolidin-2-ylidene) Phosphoramidate linkage
  modified_base order(2..16,17..26,27..29): mod_base = OTHER; note = Phosphorothioate linkage
  modified_base 26: mod_base = m5u; note = 5-methyluridine

SEQ ID NO: 62 - DNA, 28 bp, synthetic construct
  source 1..28: mol_type = other DNA
  misc_feature 15..16: note = DNA
  misc_feature order(1..14,17..28): note = RNA
  modified_base order(2..4,14,19): mod_base = OTHER; note = 2-Prime-O-Methoxyethyl modified nucleoside
  modified_base order(1,5): mod_base = OTHER; note = 2-Prime-O-Methoxyethyl modified 5-methyl Cytidine
  modified_base 15: mod_base = OTHER; note = DNA nucleotide carrying a 6-amino-5-nitro-3-yl-2(1H)-pyridone nucleobase
  modified_base order(8..13,18,20..25): mod_base = OTHER; note = 2-Prime-Fluoro modified nucleoside
  modified_base order(6..7,17,26..28): mod_base = OTHER; note = 2-Prime-O-Methyl modified nucleoside
  modified_base order(1^2,27^28): mod_base = OTHER; note = (1,3-dimethylimidazolidin-2-ylidene) Phosphoramidate linkage
  modified_base order(6..14,15^16,18..27): mod_base = OTHER; note = Phosphorothioate linkage
  modified_base 16^17: mod_base = OTHER; note = Methylphosphonate linkage
  modified_base 16: mod_base = m5u; note = 5-methyluridine
  misc_feature 1..28: note = RM106263
caaacctctgaggantgggttcattttt

SEQ ID NO: 63 - DNA, 27 bp, synthetic construct
  source 1..27: mol_type = other DNA
  misc_feature 15..16: note = DNA
  misc_feature order(1..14,17..27): note = RNA
  modified_base order(2..4,14,19): mod_base = OTHER; note = 2-Prime-O-Methoxyethyl modified nucleoside
  modified_base order(1,5): mod_base = OTHER; note = 2-Prime-O-Methoxyethyl modified 5-methyl Cytidine
  modified_base 15: mod_base = OTHER; note = DNA nucleotide carrying a 6-amino-5-nitro-3-yl-2(1H)-pyridone nucleobase
  modified_base order(8..13,18,20..25): mod_base = OTHER; note = 2-Prime-Fluoro modified nucleoside
  modified_base order(6..7,17,26..27): mod_base = OTHER; note = 2-Prime-O-Methyl modified nucleoside
  modified_base order(1^2,26^27): mod_base = OTHER; note = (1,3-dimethylimidazolidin-2-ylidene) Phosphoramidate linkage
  modified_base order(6..14,15^16,18..26): mod_base = OTHER; note = Phosphorothioate linkage
  modified_base 16^17: mod_base = OTHER; note = Methylphosphonate linkage
  modified_base 16: mod_base = m5u; note = 5-methyluridine
  misc_feature 1..27: note = RM106264
caaacctctgaggantgggttcatttt

SEQ ID NO: 64 - DNA, 26 bp, synthetic construct
  source 1..26: mol_type = other DNA
  misc_feature 15..16: note = DNA
  misc_feature order(1..14,17..26): note = RNA
  modified_base order(2..4,14,19): mod_base = OTHER; note = 2-Prime-O-Methoxyethyl modified nucleoside
  modified_base order(1,5): mod_base = OTHER; note = 2-Prime-O-Methoxyethyl modified 5-methyl Cytidine
  modified_base 15: mod_base = OTHER; note = DNA nucleotide carrying a 6-amino-5-nitro-3-yl-2(1H)-pyridone nucleobase
  modified_base order(8..13,18,20..25): mod_base = OTHER; note = 2-Prime-Fluoro modified nucleoside
  modified_base order(6..7,17,26): mod_base = OTHER; note = 2-Prime-O-Methyl modified nucleoside
  modified_base order(1^2,25^26): mod_base = OTHER; note = (1,3-dimethylimidazolidin-2-ylidene) Phosphoramidate linkage
  modified_base order(6..14,15^16,18..25): mod_base = OTHER; note = Phosphorothioate linkage
  modified_base 16^17: mod_base = OTHER; note = Methylphosphonate linkage
  modified_base 16: mod_base = m5u; note = 5-methyluridine
  misc_feature 1..26: note = RM106265
caaacctctgaggantgggttcattt

SEQ ID NO: 65 - DNA, 25 bp, synthetic construct
  source 1..25: mol_type = other DNA
  misc_feature 15..16: note = DNA
  misc_feature order(1..14,17..25): note = RNA
  modified_base order(2..4,14,19): mod_base = OTHER; note = 2-Prime-O-Methoxyethyl modified nucleoside
  modified_base order(1,5): mod_base = OTHER; note = 2-Prime-O-Methoxyethyl modified 5-methyl Cytidine
  modified_base 15: mod_base = OTHER; note = DNA nucleotide carrying a 6-amino-5-nitro-3-yl-2(1H)-pyridone nucleobase
  modified_base order(8..13,18,20..24): mod_base = OTHER; note = 2-Prime-Fluoro modified nucleoside
  modified_base order(6..7,17,25): mod_base = OTHER; note = 2-Prime-O-Methyl modified nucleoside
  modified_base order(1^2,24^25): mod_base = OTHER; note = (1,3-dimethylimidazolidin-2-ylidene) Phosphoramidate linkage
  modified_base order(6..14,15^16,18..24): mod_base = OTHER; note = Phosphorothioate linkage
  modified_base 16^17: mod_base = OTHER; note = Methylphosphonate linkage
  modified_base 16: mod_base = m5u; note = 5-methyluridine
  misc_feature 1..25: note = RM106266
caaacctctgaggantgggttcatt

SEQ ID NO: 66 - DNA, 24 bp, synthetic construct
  source 1..24: mol_type = other DNA
  misc_feature 15..16: note = DNA
  misc_feature order(1..14,17..24): note = RNA
  modified_base order(2..4,14,19): mod_base = OTHER; note = 2-Prime-O-Methoxyethyl modified nucleoside
  modified_base order(1,5): mod_base = OTHER; note = 2-Prime-O-Methoxyethyl modified 5-methyl Cytidine
  modified_base 15: mod_base = OTHER; note = DNA nucleotide carrying a 6-amino-5-nitro-3-yl-2(1H)-pyridone nucleobase
  modified_base order(8..13,18,20..24): mod_base = OTHER; note = 2-Prime-Fluoro modified nucleoside
  modified_base order(6..7,17): mod_base = OTHER; note = 2-Prime-O-Methyl modified nucleoside
  modified_base order(1^2,23^24): mod_base = OTHER; note = (1,3-dimethylimidazolidin-2-ylidene) Phosphoramidate linkage
  modified_base order(6..14,15^16,18..23): mod_base = OTHER; note = Phosphorothioate linkage
  modified_base 16^17: mod_base = OTHER; note = Methylphosphonate linkage
  modified_base 16: mod_base = m5u; note = 5-methyluridine
  misc_feature 1..24: note = RM106267
caaacctctgaggantgggttcat

SEQ ID NO: 67 - DNA, 27 bp, synthetic construct
  source 1..27: mol_type = other DNA
  misc_feature 14..15: note = DNA
  misc_feature order(1..13,16..27): note = RNA
  modified_base order(1..3,13,18): mod_base = OTHER; note = 2-Prime-O-Methoxyethyl modified nucleoside
  modified_base 4: mod_base = OTHER; note = 2-Prime-O-Methoxyethyl modified 5-methyl Cytidine
  modified_base 14: mod_base = OTHER; note = DNA nucleotide carrying a 6-amino-5-nitro-3-yl-2(1H)-pyridone nucleobase
  modified_base order(7..12,17,19..24): mod_base = OTHER; note = 2-Prime-Fluoro modified nucleoside
  modified_base order(5..6,16,25..27): mod_base = OTHER; note = 2-Prime-O-Methyl modified nucleoside
  modified_base order(1^2,26^27): mod_base = OTHER; note = (1,3-dimethylimidazolidin-2-ylidene) Phosphoramidate linkage
  modified_base order(5..13,14^15,17..26): mod_base = OTHER; note = Phosphorothioate linkage
  modified_base 15^16: mod_base = OTHER; note = Methylphosphonate linkage
  modified_base 15: mod_base = m5u; note = 5-methyluridine
  misc_feature 1..27: note = RM106268
aaacctctgaggantgggttcattttt

SEQ ID NO: 68 - DNA, 26 bp, synthetic construct
  source 1..26: mol_type = other DNA
  misc_feature 13..14: note = DNA
  misc_feature order(1..12,15..26): note = RNA
  modified_base order(1..2,12,17): mod_base = OTHER; note = 2-Prime-O-Methoxyethyl modified nucleoside
  modified_base 3: mod_base = OTHER; note = 2-Prime-O-Methoxyethyl modified 5-methyl Cytidine
  modified_base 13: mod_base = OTHER; note = DNA nucleotide carrying a 6-amino-5-nitro-3-yl-2(1H)-pyridone nucleobase
  modified_base order(6..11,16,18..23): mod_base = OTHER; note = 2-Prime-Fluoro modified nucleoside
  modified_base order(4..5,15,24..26): mod_base = OTHER; note = 2-Prime-O-Methyl modified nucleoside
  modified_base order(1^2,25^26): mod_base = OTHER; note = (1,3-dimethylimidazolidin-2-ylidene) Phosphoramidate linkage
  modified_base order(4..12,13^14,16..25): mod_base = OTHER; note = Phosphorothioate linkage
  modified_base 14^15: mod_base = OTHER; note = Methylphosphonate linkage
  modified_base 14: mod_base = m5u; note = 5-methyluridine
  misc_feature 1..26: note = RM106272
aacctctgaggantgggttcattttt

SEQ ID NO: 69 - DNA, 25 bp, synthetic construct
  source 1..25: mol_type = other DNA
  misc_feature 13..14: note = DNA
  misc_feature order(1..12,15..25): note = RNA
  modified_base order(1..2,12,17): mod_base = OTHER; note = 2-Prime-O-Methoxyethyl modified nucleoside
  modified_base 3: mod_base = OTHER; note = 2-Prime-O-Methoxyethyl modified 5-methyl Cytidine
  modified_base 13: mod_base = OTHER; note = DNA nucleotide carrying a 6-amino-5-nitro-3-yl-2(1H)-pyridone nucleobase
  modified_base order(6..11,16,18..23): mod_base = OTHER; note = 2-Prime-Fluoro modified nucleoside
  modified_base order(4..5,15,24..25): mod_base = OTHER; note = 2-Prime-O-Methyl modified nucleoside
  modified_base order(1^2,24^25): mod_base = OTHER; note = (1,3-dimethylimidazolidin-2-ylidene) Phosphoramidate linkage
  modified_base order(4..12,13^14,16..24): mod_base = OTHER; note = Phosphorothioate linkage
  modified_base 14^15: mod_base = OTHER; note = Methylphosphonate linkage
  modified_base 14: mod_base = m5u; note = 5-methyluridine
  misc_feature 1..25: note = RM106273
aacctctgaggantgggttcatttt

SEQ ID NO: 70 - DNA, 24 bp, synthetic construct
  source 1..24: mol_type = other DNA
  misc_feature 13..14: note = DNA
  misc_feature order(1..12,15..24): note = RNA
  modified_base order(1..2,12,17): mod_base = OTHER; note = 2-Prime-O-Methoxyethyl modified nucleoside
  modified_base 3: mod_base = OTHER; note = 2-Prime-O-Methoxyethyl modified 5-methyl Cytidine
  modified_base 13: mod_base = OTHER; note = DNA nucleotide carrying a 6-amino-5-nitro-3-yl-2(1H)-pyridone nucleobase
  modified_base order(6..11,16,18..23): mod_base = OTHER; note = 2-Prime-Fluoro modified nucleoside
  modified_base order(4..5,15,24): mod_base = OTHER; note = 2-Prime-O-Methyl modified nucleoside
  modified_base order(1^2,23^24): mod_base = OTHER; note = (1,3-dimethylimidazolidin-2-ylidene) Phosphoramidate linkage
  modified_base order(4..12,13^14,16..23): mod_base = OTHER; note = Phosphorothioate linkage
  modified_base 14^15: mod_base = OTHER; note = Methylphosphonate linkage
  modified_base 14: mod_base = m5u; note = 5-methyluridine
  misc_feature 1..24: note = RM106274
aacctctgaggantgggttcattt

SEQ ID NO: 71 - DNA, 25 bp, synthetic construct
  source 1..25: mol_type = other DNA
  misc_feature 12..13: note = DNA
  misc_feature order(1..11,14..25): note = RNA
  modified_base order(1,11,16): mod_base = OTHER; note = 2-Prime-O-Methoxyethyl modified nucleoside
  modified_base 2: mod_base = OTHER; note = 2-Prime-O-Methoxyethyl modified 5-methyl Cytidine
  modified_base 12: mod_base = OTHER; note = DNA nucleotide carrying a 6-amino-5-nitro-3-yl-2(1H)-pyridone nucleobase
  modified_base order(5..10,15,17..22): mod_base = OTHER; note = 2-Prime-Fluoro modified nucleoside
  modified_base order(3..4,14,23..25): mod_base = OTHER; note = 2-Prime-O-Methyl modified nucleoside
  modified_base order(1^2,24^25): mod_base = OTHER; note = (1,3-dimethylimidazolidin-2-ylidene) Phosphoramidate linkage
  modified_base order(3..11,12^13,15..24): mod_base = OTHER; note = Phosphorothioate linkage
  modified_base 13^14: mod_base = OTHER; note = Methylphosphonate linkage
  modified_base 13: mod_base = m5u; note = 5-methyluridine
  misc_feature 1..25: note = RM106275
acctctgaggantgggttcattttt

SEQ ID NO: 72 - DNA, 24 bp, synthetic construct
  source 1..24: mol_type = other DNA
  misc_feature 11..12: note = DNA
  misc_feature order(1..10,13..24): note = RNA
  modified_base order(10,15): mod_base = OTHER; note = 2-Prime-O-Methoxyethyl modified nucleoside
  modified_base 1: mod_base = OTHER; note = 2-Prime-O-Methoxyethyl modified 5-methyl Cytidine
  modified_base 11: mod_base = OTHER; note = DNA nucleotide carrying a 6-amino-5-nitro-3-yl-2(1H)-pyridone nucleobase
  modified_base order(4..9,14,16..21): mod_base = OTHER; note = 2-Prime-Fluoro modified nucleoside
  modified_base order(2..3,13,22..24): mod_base = OTHER; note = 2-Prime-O-Methyl modified nucleoside
  modified_base order(1^2,23^24): mod_base = OTHER; note = (1,3-dimethylimidazolidin-2-ylidene) Phosphoramidate linkage
  modified_base order(2..10,11^12,14..23): mod_base = OTHER; note = Phosphorothioate linkage
  modified_base 12^13: mod_base = OTHER; note = Methylphosphonate linkage
  modified_base 12: mod_base = m5u; note = 5-methyluridine
  misc_feature 1..24: note = RM106276
cctctgaggantgggttcattttt

SEQ ID NO: 73 - DNA, 30 bp, synthetic construct; identical to SEQ ID NO: 35
  source 1..30: mol_type = other DNA
  misc_feature 19..20: note = DNA
  misc_feature order(1..18,21..30): note = RNA
  modified_base order(2..3,18,23): mod_base = OTHER; note = 2-Prime-O-Methoxyethyl modified nucleoside
  modified_base order(1,5): mod_base = OTHER; note = 2-Prime-O-Methoxyethyl modified 5-methyl Cytidine
  modified_base 4: mod_base = OTHER; note = 2-Prime-O-Methoxyethyl modified 5-methyl Uridine
  modified_base 19: mod_base = OTHER; note = DNA nucleotide carrying a 6-amino-5-nitro-3-yl-2(1H)-pyridone nucleobase
  modified_base order(12..17,22,24..29): mod_base = OTHER; note = 2-Prime-Fluoro modified nucleoside
  modified_base order(6..11,21,30): mod_base = OTHER; note = 2-Prime-O-Methyl modified nucleoside
  modified_base order(1^2,29^30): mod_base = OTHER; note = (1,3-dimethylimidazolidin-2-ylidene) Phosphoramidate linkage
  modified_base order(6..18,19^20,22..29): mod_base = OTHER; note = Phosphorothioate linkage
  modified_base 20^21: mod_base = OTHER; note = Methylphosphonate linkage
  modified_base 20: mod_base = m5u; note = 5-methyluridine
  misc_feature 1..30: note = RM106277

SEQ ID NO: 74 - DNA, 29 bp, synthetic construct
  source 1..29: mol_type = other DNA
  misc_feature 19..20: note = DNA
  misc_feature order(1..18,21..29): note = RNA
  modified_base order(2..3,18,23): mod_base = OTHER; note = 2-Prime-O-Methoxyethyl modified nucleoside
  modified_base order(1,5): mod_base = OTHER; note = 2-Prime-O-Methoxyethyl modified 5-methyl Cytidine
  modified_base 4: mod_base = OTHER; note = 2-Prime-O-Methoxyethyl modified 5-methyl Uridine
  modified_base 19: mod_base = OTHER; note = DNA nucleotide carrying a 6-amino-5-nitro-3-yl-2(1H)-pyridone nucleobase
  modified_base order(12..17,22,24..29): mod_base = OTHER; note = 2-Prime-Fluoro modified nucleoside
  modified_base order(6..11,21): mod_base = OTHER; note = 2-Prime-O-Methyl modified nucleoside
  modified_base order(1^2,28^29): mod_base = OTHER; note = (1,3-dimethylimidazolidin-2-ylidene) Phosphoramidate linkage
  modified_base order(6..18,19^20,22..28): mod_base = OTHER; note = Phosphorothioate linkage
  modified_base 20^21: mod_base = OTHER; note = Methylphosphonate linkage
  modified_base 20: mod_base = m5u; note = 5-methyluridine
  misc_feature 1..29: note = RM106278
cggtcaaacctctgaggantgggttcatt

SEQ ID NO: 75 - DNA, 29 bp, synthetic construct
  source 1..29: mol_type = other DNA
  misc_feature 18..19: note = DNA
  misc_feature order(1..17,20..29): note = RNA
  modified_base order(1..2,17,22): mod_base = OTHER; note = 2-Prime-O-Methoxyethyl modified nucleoside
  modified_base 4: mod_base = OTHER; note = 2-Prime-O-Methoxyethyl modified 5-methyl Cytidine
  modified_base 3: mod_base = OTHER; note = 2-Prime-O-Methoxyethyl modified 5-methyl Uridine
  modified_base 18: mod_base = OTHER; note = DNA nucleotide carrying a 6-amino-5-nitro-3-yl-2(1H)-pyridone nucleobase
  modified_base order(11..16,21,23..28): mod_base = OTHER; note = 2-Prime-Fluoro modified nucleoside
  modified_base order(5..10,20,29): mod_base = OTHER; note = 2-Prime-O-Methyl modified nucleoside
  modified_base order(1^2,28^29): mod_base = OTHER; note = (1,3-dimethylimidazolidin-2-ylidene) Phosphoramidate linkage
  modified_base order(5..17,18^19,21..28): mod_base = OTHER; note = Phosphorothioate linkage
  modified_base 19^20: mod_base = OTHER; note = Methylphosphonate linkage
  modified_base 19: mod_base = m5u; note = 5-methyluridine
  misc_feature 1..29: note = RM106279
ggtcaaacctctgaggantgggttcattt

SEQ ID NO: 76 - DNA, 28 bp, synthetic construct
  source 1..28: mol_type = other DNA
  misc_feature 17..18: note = DNA
  misc_feature order(1..16,19..28): note = RNA
  modified_base order(1,16,21): mod_base = OTHER; note = 2-Prime-O-Methoxyethyl modified nucleoside
  modified_base 3: mod_base = OTHER; note = 2-Prime-O-Methoxyethyl modified 5-methyl Cytidine
  modified_base 2: mod_base = OTHER; note = 2-Prime-O-Methoxyethyl modified 5-methyl Uridine
  modified_base 17: mod_base = OTHER; note = DNA nucleotide carrying a 6-amino-5-nitro-3-yl-2(1H)-pyridone nucleobase
  modified_base order(10..15,20,22..27): mod_base = OTHER; note = 2-Prime-Fluoro modified nucleoside
  modified_base order(4..9,19,28): mod_base = OTHER; note = 2-Prime-O-Methyl modified nucleoside
  modified_base order(1^2,27^28): mod_base = OTHER; note = (1,3-dimethylimidazolidin-2-ylidene) Phosphoramidate linkage
  modified_base order(4..16,17^18,20..27): mod_base = OTHER; note = Phosphorothioate linkage
  modified_base 18^19: mod_base = OTHER; note = Methylphosphonate linkage
  modified_base 18: mod_base = m5u; note = 5-methyluridine
  misc_feature 1..28: note = RM106280
gtcaaacctctgaggantgggttcattt

SEQ ID NO: 77 - DNA, 27 bp, synthetic construct
  source 1..27: mol_type = other DNA
  misc_feature 16..17: note = DNA
  misc_feature order(1..15,18..27): note = RNA
  modified_base order(15,20): mod_base = OTHER; note = 2-Prime-O-Methoxyethyl modified nucleoside
  modified_base 2: mod_base = OTHER; note = 2-Prime-O-Methoxyethyl modified 5-methyl Cytidine
  modified_base 1: mod_base = OTHER; note = 2-Prime-O-Methoxyethyl modified 5-methyl Uridine
  modified_base 16: mod_base = OTHER; note = DNA nucleotide carrying a 6-amino-5-nitro-3-yl-2(1H)-pyridone nucleobase
  modified_base order(9..14,19,21..26): mod_base = OTHER; note = 2-Prime-Fluoro modified nucleoside
  modified_base order(3..8,18,27): mod_base = OTHER; note = 2-Prime-O-Methyl modified nucleoside
  modified_base order(1^2,26^27): mod_base = OTHER; note = (1,3-dimethylimidazolidin-2-ylidene) Phosphoramidate linkage
  modified_base order(3..15,16^17,19..26): mod_base = OTHER; note = Phosphorothioate linkage
  modified_base 17^18: mod_base = OTHER; note = Methylphosphonate linkage
  modified_base 17: mod_base = m5u; note = 5-methyluridine
  misc_feature 1..27: note = RM106281
tcaaacctctgaggantgggttcattt

SEQ ID NO: 78 - DNA, 26 bp, synthetic construct
  source 1..26: mol_type = other DNA
  misc_feature 15..16: note = DNA
  misc_feature order(1..14,17..26): note = RNA
  modified_base order(14,19): mod_base = OTHER; note = 2-Prime-O-Methoxyethyl modified nucleoside
  modified_base 1: mod_base = OTHER; note = 2-Prime-O-Methoxyethyl modified 5-methyl Cytidine
  modified_base 15: mod_base = OTHER; note = DNA nucleotide carrying a 6-amino-5-nitro-3-yl-2(1H)-pyridone nucleobase
  modified_base order(8..13,18,20..25): mod_base = OTHER; note = 2-Prime-Fluoro modified nucleoside
  modified_base order(2..7,17,26): mod_base = OTHER; note = 2-Prime-O-Methyl modified nucleoside
  modified_base order(1^2,25^26): mod_base = OTHER; note = (1,3-dimethylimidazolidin-2-ylidene) Phosphoramidate linkage
  modified_base order(2..14,15^16,18..25): mod_base = OTHER; note = Phosphorothioate linkage
  modified_base 16^17: mod_base = OTHER; note = Methylphosphonate linkage
  modified_base 16: mod_base = m5u; note = 5-methyluridine
  misc_feature 1..26: note = RM106282
caaacctctgaggantgggttcattt

SEQ ID NO: 79 - DNA, 25 bp, synthetic construct
  source 1..25: mol_type = other DNA
  misc_feature 14..15: note = DNA
  misc_feature order(1..13,16..25): note = RNA
  modified_base order(13,18): mod_base = OTHER; note = 2-Prime-O-Methoxyethyl modified nucleoside
  modified_base 14: mod_base = OTHER; note = DNA nucleotide carrying a 6-amino-5-nitro-3-yl-2(1H)-pyridone nucleobase
  modified_base order(7..12,17,19..24): mod_base = OTHER; note = 2-Prime-Fluoro modified nucleoside
  modified_base order(1..6,16,25): mod_base = OTHER; note = 2-Prime-O-Methyl modified nucleoside
  modified_base order(1^2,24^25): mod_base = OTHER; note = (1,3-dimethylimidazolidin-2-ylidene) Phosphoramidate linkage
  modified_base order(2..13,14^15,17..24): mod_base = OTHER; note = Phosphorothioate linkage
  modified_base 15^16: mod_base = OTHER; note = Methylphosphonate linkage
  modified_base 15: mod_base = m5u; note = 5-methyluridine
  misc_feature 1..25: note = RM106283
aaacctctgaggantgggttcattt

SEQ ID NO: 80 - DNA, 28 bp, synthetic construct
  source 1..28: mol_type = other DNA
  misc_feature 19..20: note = DNA
  misc_feature order(1..18,21..28): note = RNA
  modified_base order(2..3,18,23): mod_base = OTHER; note = 2-Prime-O-Methoxyethyl modified nucleoside
  modified_base order(1,5): mod_base = OTHER; note = 2-Prime-O-Methoxyethyl modified 5-methyl Cytidine
  modified_base 4: mod_base = OTHER; note = 2-Prime-O-Methoxyethyl modified 5-methyl Uridine
  modified_base 19: mod_base = OTHER; note = DNA nucleotide carrying a 6-amino-5-nitro-3-yl-2(1H)-pyridone nucleobase
  modified_base order(12..17,22,24..28): mod_base = OTHER; note = 2-Prime-Fluoro modified nucleoside
  modified_base order(6..11,21): mod_base = OTHER; note = 2-Prime-O-Methyl modified nucleoside
  modified_base order(1^2,27^28): mod_base = OTHER; note = (1,3-dimethylimidazolidin-2-ylidene) Phosphoramidate linkage
  modified_base order(6..18,19^20,22..27): mod_base = OTHER; note = Phosphorothioate linkage
  modified_base 20^21: mod_base = OTHER; note = Methylphosphonate linkage
  modified_base 20: mod_base = m5u; note = 5-methyluridine
  misc_feature 1..28: note = RM106284
cggtcaaacctctgaggantgggttcat

SEQ ID NO: 81 - DNA, 27 bp, synthetic construct
  source 1..27: mol_type = other DNA
  misc_feature 19..20: note = DNA
  misc_feature order(1..18,21..27): note = RNA
  modified_base order(2..3,18,23): mod_base = OTHER; note = 2-Prime-O-Methoxyethyl modified nucleoside
  modified_base order(1,5): mod_base = OTHER; note = 2-Prime-O-Methoxyethyl modified 5-methyl Cytidine
  modified_base 4: mod_base = OTHER; note = 2-Prime-O-Methoxyethyl modified 5-methyl Uridine
  modified_base 19: mod_base = OTHER; note = DNA nucleotide carrying a 6-amino-5-nitro-3-yl-2(1H)-pyridone nucleobase
  modified_base order(12..17,22,24..27): mod_base = OTHER; note = 2-Prime-Fluoro modified nucleoside
  modified_base order(6..11,21): mod_base = OTHER; note = 2-Prime-O-Methyl modified nucleoside
  modified_base order(1^2,26^27): mod_base = OTHER; note = (1,3-dimethylimidazolidin-2-ylidene) Phosphoramidate linkage
  modified_base order(6..18,19^20,22..26): mod_base = OTHER; note = Phosphorothioate linkage
  modified_base 20^21: mod_base = OTHER; note = Methylphosphonate linkage
  modified_base 20: mod_base = m5u; note = 5-methyluridine
  misc_feature 1..27: note = RM106285
cggtcaaacctctgaggantgggttca

SEQ ID NO: 82 - DNA, 26 bp, synthetic construct
  source 1..26: mol_type = other DNA
  misc_feature 19..20: note = DNA
  misc_feature order(1..18,21..26): note = RNA
  modified_base order(2..3,18,23): mod_base = OTHER; note = 2-Prime-O-Methoxyethyl modified nucleoside
  modified_base order(1,5): mod_base = OTHER; note = 2-Prime-O-Methoxyethyl modified 5-methyl Cytidine
  modified_base 4: mod_base = OTHER; note = 2-Prime-O-Methoxyethyl modified 5-methyl Uridine
  modified_base 19: mod_base = OTHER; note = DNA nucleotide carrying a 6-amino-5-nitro-3-yl-2(1H)-pyridone nucleobase
  modified_base order(12..17,22,24..26): mod_base = OTHER; note = 2-Prime-Fluoro modified nucleoside
  modified_base order(6..11,21): mod_base = OTHER; note = 2-Prime-O-Methyl modified nucleoside
  modified_base order(1^2,25^26): mod_base = OTHER; note = (1,3-dimethylimidazolidin-2-ylidene) Phosphoramidate linkage
  modified_base order(6..18,19^20,22..25): mod_base = OTHER; note = Phosphorothioate linkage
  modified_base 20^21: mod_base = OTHER; note = Methylphosphonate linkage
  modified_base 20: mod_base = m5u; note = 5-methyluridine
  misc_feature 1..26: note = RM106286
cggtcaaacctctgaggantgggttc

SEQ ID NO: 83 - DNA, 25 bp, synthetic construct
  source 1..25: mol_type = other DNA
  misc_feature 19..20: note = DNA
  misc_feature order(1..18,21..25): note = RNA
  modified_base order(2..3,18,23): mod_base = OTHER; note = 2-Prime-O-Methoxyethyl modified nucleoside
  modified_base order(1,5): mod_base = OTHER; note = 2-Prime-O-Methoxyethyl modified 5-methyl Cytidine
  modified_base 4: mod_base = OTHER; note = 2-Prime-O-Methoxyethyl modified 5-methyl Uridine
  modified_base 19: mod_base = OTHER; note = DNA nucleotide carrying a 6-amino-5-nitro-3-yl-2(1H)-pyridone nucleobase
  modified_base order(12..17,22,24..25): mod_base = OTHER; note = 2-Prime-Fluoro modified nucleoside
  modified_base order(6..11,21): mod_base = OTHER; note = 2-Prime-O-Methyl modified nucleoside
  modified_base order(1^2,24^25): mod_base = OTHER; note = (1,3-dimethylimidazolidin-2-ylidene) Phosphoramidate linkage
  modified_base order(6..18,19^20,22..24): mod_base = OTHER; note = Phosphorothioate linkage
  modified_base 20^21: mod_base = OTHER; note = Methylphosphonate linkage
  modified_base 20: mod_base = m5u; note = 5-methyluridine
  misc_feature 1..25: note = RM106287
cggtcaaacctctgaggantgggtt

SEQ ID NO: 84 - DNA, 27 bp, synthetic construct
  source 1..27: mol_type = other DNA
  misc_feature 18..19: note = DNA
  misc_feature order(1..17,20..27): note = RNA
  modified_base order(1..2,17,22): mod_base = OTHER; note = 2-Prime-O-Methoxyethyl modified nucleoside
  modified_base 4: mod_base = OTHER; note = 2-Prime-O-Methoxyethyl modified 5-methyl Cytidine
  modified_base 3: mod_base = OTHER; note = 2-Prime-O-Methoxyethyl modified 5-methyl Uridine
  modified_base 18: mod_base = OTHER; note = DNA nucleotide carrying a 6-amino-5-nitro-3-yl-2(1H)-pyridone nucleobase
  modified_base order(11..16,21,23..27): mod_base = OTHER; note = 2-Prime-Fluoro modified nucleoside
  modified_base order(5..10,20): mod_base = OTHER; note = 2-Prime-O-Methyl modified nucleoside
  modified_base order(1^2,26^27): mod_base = OTHER; note = (1,3-dimethylimidazolidin-2-ylidene) Phosphoramidate linkage
  modified_base order(5..17,18^19,21..26): mod_base = OTHER; note = Phosphorothioate linkage
  modified_base 19^20: mod_base = OTHER; note = Methylphosphonate linkage
  modified_base 19: mod_base = m5u; note = 5-methyluridine
  misc_feature 1..27: note = RM106288
ggtcaaacctctgaggantgggttcat

SEQ ID NO: 85 - DNA, 26 bp, synthetic construct
  source 1..26: mol_type = other DNA
  misc_feature 17..18: note = DNA
  misc_feature order(1..16,19..26): note = RNA
  modified_base order(1,16,21): mod_base = OTHER; note = 2-Prime-O-Methoxyethyl modified nucleoside
  modified_base 3: mod_base = OTHER; note = 2-Prime-O-Methoxyethyl modified 5-methyl Cytidine
  modified_base 2: mod_base = OTHER; note = 2-Prime-O-Methoxyethyl modified 5-methyl Uridine
  modified_base 17: mod_base = OTHER; note = DNA nucleotide carrying a 6-amino-5-nitro-3-yl-2(1H)-pyridone nucleobase
  modified_base order(10..15,20,22..26): mod_base = OTHER; note = 2-Prime-Fluoro modified nucleoside
  modified_base order(4..9,19): mod_base = OTHER; note = 2-Prime-O-Methyl modified nucleoside
  modified_base order(1^2,25^26): mod_base = OTHER; note = (1,3-dimethylimidazolidin-2-ylidene) Phosphoramidate linkage
  modified_base order(4..16,17^18,20..25): mod_base = OTHER; note = Phosphorothioate linkage
  modified_base 18^19: mod_base = OTHER; note = Methylphosphonate linkage
  modified_base 18: mod_base = m5u; note = 5-methyluridine
  misc_feature 1..26: note = RM106289
gtcaaacctctgaggantgggttcat

SEQ ID NO: 86 - DNA, 25 bp, synthetic construct
  source 1..25: mol_type = other DNA
  misc_feature 16..17: note = DNA
  misc_feature order(1..15,18..25): note = RNA
  modified_base order(15,20): mod_base = OTHER; note = 2-Prime-O-Methoxyethyl modified nucleoside
  modified_base 2: mod_base = OTHER; note = 2-Prime-O-Methoxyethyl modified 5-methyl Cytidine
  modified_base 1: mod_base = OTHER; note = 2-Prime-O-Methoxyethyl modified 5-methyl Uridine
  modified_base 16: mod_base = OTHER; note = DNA nucleotide carrying a 6-amino-5-nitro-3-yl-2(1H)-pyridone nucleobase
  modified_base order(9..14,19,21..25): mod_base = OTHER; note = 2-Prime-Fluoro modified nucleoside
  modified_base order(3..8,18): mod_base = OTHER; note = 2-Prime-O-Methyl modified nucleoside
  modified_base order(1^2,24^25): mod_base = OTHER; note = (1,3-dimethylimidazolidin-2-ylidene) Phosphoramidate linkage
  modified_base order(3..15,16^17,19..24): mod_base = OTHER; note = Phosphorothioate linkage
  modified_base 17^18: mod_base = OTHER; note = Methylphosphonate linkage
  modified_base 17: mod_base = m5u; note = 5-methyluridine
  misc_feature 1..25: note = RM106290
tcaaacctctgaggantgggttcat

SEQ ID NO: 87 - DNA, 24 bp, synthetic construct
  source 1..24: mol_type = other DNA
  misc_feature 15..16: note = DNA
  misc_feature order(1..14,17..24): note = RNA
  modified_base order(14,19): mod_base = OTHER; note = 2-Prime-O-Methoxyethyl modified nucleoside
  modified_base 1: mod_base = OTHER; note = 2-Prime-O-Methoxyethyl modified 5-methyl Cytidine
  modified_base 15: mod_base = OTHER; note = DNA nucleotide carrying a 6-amino-5-nitro-3-yl-2(1H)-pyridone nucleobase
  modified_base order(8..13,18,20..24): mod_base = OTHER; note = 2-Prime-Fluoro modified nucleoside
  modified_base order(2..7,17): mod_base = OTHER; note = 2-Prime-O-Methyl modified nucleoside
  modified_base order(1^2,23^24): mod_base = OTHER; note = (1,3-dimethylimidazolidin-2-ylidene) Phosphoramidate linkage
  modified_base order(2..14,15^16,18..23): mod_base = OTHER; note = Phosphorothioate linkage
  modified_base 16^17: mod_base = OTHER; note = Methylphosphonate linkage
  modified_base 16: mod_base = m5u; note = 5-methyluridine
  misc_feature 1..24: note = RM106291
caaacctctgaggantgggttcat

SEQ ID NO: 88 - DNA, 23 bp, synthetic construct
  source 1..23: mol_type = other DNA
  misc_feature 14..15: note = DNA
  misc_feature order(1..13,16..23): note = RNA
  modified_base order(13,18): mod_base = OTHER; note = 2-Prime-O-Methoxyethyl modified nucleoside
  modified_base 14: mod_base = OTHER; note = DNA nucleotide carrying a 6-amino-5-nitro-3-yl-2(1H)-pyridone nucleobase
  modified_base order(7..12,17,19..23): mod_base = OTHER; note = 2-Prime-Fluoro modified nucleoside
  modified_base order(1..6,16): mod_base = OTHER; note = 2-Prime-O-Methyl modified nucleoside
  modified_base order(1^2,22^23): mod_base = OTHER; note = (1,3-dimethylimidazolidin-2-ylidene) Phosphoramidate linkage
  modified_base order(2..13,14^15,17..22): mod_base = OTHER; note = Phosphorothioate linkage
  modified_base 15^16: mod_base = OTHER; note = Methylphosphonate linkage
  modified_base 15: mod_base = m5u; note = 5-methyluridine
  misc_feature 1..23: note = RM106292
aaacctctgaggantgggttcat

SEQ ID NO: 89 - DNA, 32 bp, synthetic construct
  source 1..32: mol_type = other DNA
  misc_feature 19..20: note = DNA
  misc_feature order(1..18,21..32): note = RNA
  modified_base order(1..4,18,23): mod_base = OTHER; note = 2-Prime-O-Methoxyethyl modified nucleoside
  modified_base 5: mod_base = OTHER; note = 2-Prime-O-Methoxyethyl modified 5-methyl Uridine
  modified_base 19: mod_base = OTHER; note = DNA nucleotide carrying a 6-amino-5-nitro-3-yl-2(1H)-pyridone nucleobase
  modified_base order(12..17,22,24..29): mod_base = OTHER; note = 2-Prime-Fluoro modified nucleoside
  modified_base order(6..11,21,30..32): mod_base = OTHER; note = 2-Prime-O-Methyl modified nucleoside
  modified_base order(1^2,31^32): mod_base = OTHER; note = (1,3-dimethylimidazolidin-2-ylidene) Phosphoramidate linkage
  modified_base order(6..18,19^20,22..31): mod_base = OTHER; note = Phosphorothioate linkage
  modified_base 20^21: mod_base = OTHER; note = Methylphosphonate linkage
  modified_base 20: mod_base = m5u; note = 5-methyluridine
  misc_feature 1..32: note = RM106382
agaatgcacctctgaggantgggttcattttt

SEQ ID NO: 90 - DNA, 30 bp, synthetic construct
  source 1..30: mol_type = other DNA
  misc_feature 17..18: note = DNA
  misc_feature order(1..16,19..30): note = RNA
  modified_base order(1..2,4,16,21): mod_base = OTHER; note = 2-Prime-O-Methoxyethyl modified nucleoside
  modified_base 5: mod_base = OTHER; note = 2-Prime-O-Methoxyethyl modified 5-methyl Cytidine
  modified_base 3: mod_base = OTHER; note = 2-Prime-O-Methoxyethyl modified 5-methyl Uridine
  modified_base 17: mod_base = OTHER; note = DNA nucleotide carrying a 6-amino-5-nitro-3-yl-2(1H)-pyridone nucleobase
  modified_base order(10..15,20,22..27): mod_base = OTHER; note = 2-Prime-Fluoro modified nucleoside
  modified_base order(6..9,19,28..30): mod_base = OTHER; note = 2-Prime-O-Methyl modified nucleoside
  modified_base order(1^2,29^30): mod_base = OTHER; note = (1,3-dimethylimidazolidin-2-ylidene) Phosphoramidate linkage
  modified_base order(6..16,17^18,20..29): mod_base = OTHER; note = Phosphorothioate linkage
  modified_base 18^19: mod_base = OTHER; note = Methylphosphonate linkage
  modified_base 18: mod_base = m5u; note = 5-methyluridine
  misc_feature 1..30: note = RM106383
aatgcacctctgaggantgggttcattttt

SEQ ID NO: 91 - DNA, 29 bp, synthetic construct
  source 1..29: mol_type = other DNA
  misc_feature 16..17: note = DNA
  misc_feature order(1..15,18..29): note = RNA
  modified_base order(1,3,15,20): mod_base = OTHER; note = 2-Prime-O-Methoxyethyl modified nucleoside
  modified_base 4: mod_base = OTHER; note = 2-Prime-O-Methoxyethyl modified 5-methyl Cytidine
  modified_base 2: mod_base = OTHER; note = 2-Prime-O-Methoxyethyl modified 5-methyl Uridine
  modified_base 16: mod_base = OTHER; note = DNA nucleotide carrying a 6-amino-5-nitro-3-yl-2(1H)-pyridone nucleobase
  modified_base order(9..14,19,21..26): mod_base = OTHER; note = 2-Prime-Fluoro modified nucleoside
  modified_base order(5..8,18,27..29): mod_base = OTHER; note = 2-Prime-O-Methyl modified nucleoside
  modified_base order(1^2,28^29): mod_base = OTHER; note = (1,3-dimethylimidazolidin-2-ylidene) Phosphoramidate linkage
  modified_base order(7..15,16^17,19..28): mod_base = OTHER; note = Phosphorothioate linkage
  modified_base 17^18: mod_base = OTHER; note = Methylphosphonate linkage
  modified_base 17: mod_base = m5u; note = 5-methyluridine
  misc_feature 1..29: note = RM106384
atgcacctctgaggantgggttcattttt

SEQ ID NO: 92 - DNA, 28 bp, synthetic construct
  source 1..28: mol_type = other DNA
  misc_feature 15..16: note = DNA
  misc_feature order(1..14,17..28): note = RNA
  modified_base order(2,4,14,19): mod_base = OTHER; note = 2-Prime-O-Methoxyethyl modified nucleoside
  modified_base order(3,5): mod_base = OTHER; note = 2-Prime-O-Methoxyethyl modified 5-methyl Cytidine
  modified_base 1: mod_base = OTHER; note = 2-Prime-O-Methoxyethyl modified 5-methyl Uridine
  modified_base 15: mod_base = OTHER; note = DNA nucleotide carrying a 6-amino-5-nitro-3-yl-2(1H)-pyridone nucleobase
  modified_base order(8..13,18,20..25): mod_base = OTHER; note = 2-Prime-Fluoro modified nucleoside
  modified_base order(6..7,17,26..28): mod_base = OTHER; note = 2-Prime-O-Methyl modified nucleoside
  modified_base order(1^2,27^28): mod_base = OTHER; note = (1,3-dimethylimidazolidin-2-ylidene) Phosphoramidate linkage
  modified_base order(6..14,15^16,18..27): mod_base = OTHER; note = Phosphorothioate linkage
  modified_base 16^17: mod_base = OTHER; note = Methylphosphonate linkage
  modified_base 16: mod_base = m5u; note = 5-methyluridine
  misc_feature 1..28: note = RM106385
tgcacctctgaggantgggttcattttt

SEQ ID NO: 93 - DNA, 27 bp, synthetic construct
  source 1..27: mol_type = other DNA
  misc_feature 14..15: note = DNA
  misc_feature order(1..13,16..27): note = RNA
  modified_base order(1,3,13,18): mod_base = OTHER; note = 2-Prime-O-Methoxyethyl modified nucleoside
  modified_base order(2,4): mod_base = OTHER; note = 2-Prime-O-Methoxyethyl modified 5-methyl Cytidine
  modified_base 14: mod_base = OTHER; note = DNA nucleotide carrying a 6-amino-5-nitro-3-yl-2(1H)-pyridone nucleobase
  modified_base order(7..12,17,19..24): mod_base = OTHER; note = 2-Prime-Fluoro modified nucleoside
  modified_base order(5..6,16,25..27): mod_base = OTHER; note = 2-Prime-O-Methyl modified nucleoside
  modified_base order(1^2,26^27): mod_base = OTHER; note = (1,3-dimethylimidazolidin-2-ylidene) Phosphoramidate linkage
  modified_base order(5..13,14^15,17..26): mod_base = OTHER; note = Phosphorothioate linkage
  modified_base 15^16: mod_base = OTHER; note = Methylphosphonate linkage
  modified_base 15: mod_base = m5u; note = 5-methyluridine
  misc_feature 1..27: note = RM106386
gcacctctgaggantgggttcattttt

SEQ ID NO: 94 - DNA, 26 bp, synthetic construct
  source 1..26: mol_type = other DNA
  misc_feature 13..14: note = DNA
  misc_feature order(1..12,15..26): note = RNA
  modified_base order(2,12,17): mod_base = OTHER; note = 2-Prime-O-Methoxyethyl modified nucleoside
  modified_base order(1,3): mod_base = OTHER; note = 2-Prime-O-Methoxyethyl modified 5-methyl Cytidine
  modified_base 13: mod_base = OTHER; note = DNA nucleotide carrying a 6-amino-5-nitro-3-yl-2(1H)-pyridone nucleobase
  modified_base order(6..11,16,18..23): mod_base = OTHER; note = 2-Prime-Fluoro modified nucleoside
  modified_base order(4..5,15,24..26): mod_base = OTHER; note = 2-Prime-O-Methyl modified nucleoside
  modified_base order(1^2,25^26): mod_base = OTHER; note = (1,3-dimethylimidazolidin-2-ylidene) Phosphoramidate linkage
  modified_base order(4..12,13^14,16..25): mod_base = OTHER; note = Phosphorothioate linkage
  modified_base 14^15: mod_base = OTHER; note = Methylphosphonate linkage
  modified_base 14: mod_base = m5u; note = 5-methyluridine
  misc_feature 1..26: note = RM106387
cacctctgaggantgggttcattttt

SEQ ID NO: 95 - DNA, 25 bp, synthetic construct
  source 1..25: mol_type = other DNA
  misc_feature 12..13: note = DNA
  misc_feature order(1..11,14..25): note = RNA
  modified_base order(1,11,16): mod_base = OTHER; note = 2-Prime-O-Methoxyethyl modified nucleoside
  modified_base 2: mod_base = OTHER; note = 2-Prime-O-Methoxyethyl modified 5-methyl Cytidine
  modified_base 12: mod_base = OTHER; note = DNA nucleotide carrying a 6-amino-5-nitro-3-yl-2(1H)-pyridone nucleobase
  modified_base order(5..10,15,17..22): mod_base = OTHER; note = 2-Prime-Fluoro modified nucleoside
  modified_base order(3..4,14,23..25): mod_base = OTHER; note = 2-Prime-O-Methyl modified nucleoside
  modified_base order(1^2,24^25): mod_base = OTHER; note = (1,3-dimethylimidazolidin-2-ylidene) Phosphoramidate linkage
  modified_base order(3..11,12^13,15..24): mod_base = OTHER; note = Phosphorothioate linkage
  modified_base 13^14: mod_base = OTHER; note = Methylphosphonate linkage
  modified_base 13: mod_base = m5u; note = 5-methyluridine
  misc_feature 1..25: note = RM106388
acctctgaggantgggttcattttt

SEQ ID NO: 96 - DNA, 29 bp, synthetic construct
  source 1..29: mol_type = other DNA
  misc_feature 17..18: note = DNA
  misc_feature order(1..16,19..29): note = RNA
  modified_base order(1..2,16,21): mod_base = OTHER; note = 2-Prime-O-Methoxyethyl modified nucleoside
  modified_base 3: mod_base = OTHER; note = 2-Prime-O-Methoxyethyl modified 5-methyl Uridine
  modified_base 17: mod_base = OTHER; note = DNA nucleotide carrying a 6-amino-5-nitro-3-yl-2(1H)-pyridone nucleobase
  modified_base order(10..15,20,22..27): mod_base = OTHER; note = 2-Prime-Fluoro modified nucleoside
  modified_base order(4..9,19,28..29): mod_base = OTHER; note = 2-Prime-O-Methyl modified nucleoside
  modified_base order(1^2,28^29): mod_base = OTHER; note = (1,3-dimethylimidazolidin-2-ylidene) Phosphoramidate linkage
  modified_base order(6..16,17^18,20..28): mod_base = OTHER; note = Phosphorothioate linkage
  modified_base 18^19: mod_base = OTHER; note = Methylphosphonate linkage
  modified_base 18: mod_base = m5u; note = 5-methyluridine
  misc_feature 1..29: note = RM106389
aatgcacctctgaggantgggttcatttt

SEQ ID NO: 97 - DNA, 30 bp, synthetic construct
  source 1..30: mol_type = other DNA
  misc_feature 19..20: note = DNA
  misc_feature order(1..18,21..30): note = RNA
  modified_base order(1..4,18,23): mod_base = OTHER; note = 2-Prime-O-Methoxyethyl modified nucleoside
  modified_base 5: mod_base = OTHER; note = 2-Prime-O-Methoxyethyl modified 5-methyl Uridine
  modified_base 19: mod_base = OTHER; note = DNA nucleotide carrying a 6-amino-5-nitro-3-yl-2(1H)-pyridone nucleobase
  modified_base order(12..17,22,24..29): mod_base = OTHER; note = 2-Prime-Fluoro modified nucleoside
  modified_base order(6..11,21,30): mod_base = OTHER; note = 2-Prime-O-Methyl modified nucleoside
  modified_base order(1^2,29^30): mod_base = OTHER; note = (1,3-dimethylimidazolidin-2-ylidene) Phosphoramidate linkage
  modified_base order(6..18,19^20,22..29): mod_base = OTHER; note = Phosphorothioate linkage
  modified_base 20^21: mod_base = OTHER; note = Methylphosphonate linkage
  modified_base 20: mod_base = m5u; note = 5-methyluridine
  misc_feature 1..30: note = RM106390
agaatgcacctctgaggantgggttcattt

SEQ ID NO: 98 - DNA, 29 bp, synthetic construct
  source 1..29: mol_type = other DNA
  misc_feature 18..19: note = DNA
  misc_feature order(1..17,20..29): note = RNA
  modified_base order(1..3,17,22): mod_base = OTHER; note = 2-Prime-O-Methoxyethyl modified nucleoside
  modified_base 4: mod_base = OTHER; note = 2-Prime-O-Methoxyethyl modified 5-methyl Uridine
  modified_base 18: mod_base = OTHER; note = DNA nucleotide carrying a 6-amino-5-nitro-3-yl-2(1H)-pyridone nucleobase
  modified_base order(11..16,21,23..28): mod_base = OTHER; note = 2-Prime-Fluoro modified nucleoside
  modified_base order(5..10,20,29): mod_base = OTHER; note = 2-Prime-O-Methyl modified nucleoside
  modified_base order(1^2,28^29): mod_base = OTHER; note = (1,3-dimethylimidazolidin-2-ylidene) Phosphoramidate linkage
  modified_base order(5..17,18^19,21..28): mod_base = OTHER; note = Phosphorothioate linkage
  modified_base 19^20: mod_base = OTHER; note = Methylphosphonate linkage
  modified_base 19: mod_base = m5u; note = 5-methyluridine
  misc_feature 1..29: note = RM106391
gaatgcacctctgaggantgggttcattt

SEQ ID NO: 99 - DNA, 28 bp, synthetic construct
  source 1..28: mol_type = other DNA
  misc_feature 17..18: note = DNA
  misc_feature order(1..16,19..28): note = RNA
  modified_base order(1..2,16,21): mod_base = OTHER; note = 2-Prime-O-Methoxyethyl modified nucleoside
  modified_base 3: mod_base = OTHER; note = 2-Prime-O-Methoxyethyl modified 5-methyl Uridine
  modified_base 17: mod_base = OTHER; note = DNA nucleotide carrying a 6-amino-5-nitro-3-yl-2(1H)-pyridone nucleobase
  modified_base order(10..15,20,22..27): mod_base = OTHER; note = 2-Prime-Fluoro modified nucleoside
  modified_base order(4..9,19,28): mod_base = OTHER; note = 2-Prime-O-Methyl modified nucleoside
  modified_base order(1^2,27^28): mod_base = OTHER; note = (1,3-dimethylimidazolidin-2-ylidene) Phosphoramidate linkage
  modified_base order(4..16,17^18,20..27): mod_base = OTHER; note = Phosphorothioate linkage
  modified_base 18^19: mod_base = OTHER; note = Methylphosphonate linkage
  modified_base 18: mod_base = m5u; note = 5-methyluridine
  misc_feature 1..28: note = RM106392
aatgcacctctgaggantgggttcattt

SEQ ID NO: 100 - DNA, 27 bp, synthetic construct
  source 1..27: mol_type = other DNA
  misc_feature 16..17: note = DNA
  misc_feature order(1..15,18..27): note = RNA
  modified_base order(1,15,20): mod_base = OTHER; note = 2-Prime-O-Methoxyethyl modified nucleoside
  modified_base 2: mod_base = OTHER; note = 2-Prime-O-Methoxyethyl modified 5-methyl Uridine
  modified_base 16: mod_base = OTHER; note = DNA nucleotide carrying a 6-amino-5-nitro-3-yl-2(1H)-pyridone nucleobase
  modified_base order(9..14,19,21..26): mod_base = OTHER; note = 2-Prime-Fluoro modified nucleoside
  modified_base order(3..8,18,27): mod_base = OTHER; note = 2-Prime-O-Methyl modified nucleoside
  modified_base order(1^2,26^27): mod_base = OTHER; note = (1,3-dimethylimidazolidin-2-ylidene) Phosphoramidate linkage
  modified_base order(3..15,16^17,19..26): mod_base = OTHER; note = Phosphorothioate linkage
  modified_base 17^18: mod_base = OTHER; note = Methylphosphonate linkage
  modified_base 17: mod_base = m5u; note = 5-methyluridine
  misc_feature 1..27: note = RM106393
atgcacctctgaggantgggttcattt

SEQ ID NO: 101 - DNA, 26 bp, synthetic construct
  source 1..26: mol_type = other DNA
  misc_feature 15..16: note = DNA
  misc_feature order(1..14,17..26): note = RNA
  modified_base order(14,19): mod_base = OTHER; note = 2-Prime-O-Methoxyethyl modified nucleoside
  modified_base 1: mod_base = OTHER; note = 2-Prime-O-Methoxyethyl modified 5-methyl Uridine
  modified_base 15: mod_base = OTHER; note = DNA nucleotide carrying a 6-amino-5-nitro-3-yl-2(1H)-pyridone nucleobase
  modified_base order(8..13,18,20..25): mod_base = OTHER; note = 2-Prime-Fluoro modified nucleoside
  modified_base order(2..7,17,26): mod_base = OTHER; note = 2-Prime-O-Methyl modified nucleoside
  modified_base order(1^2,25^26): mod_base = OTHER; note = (1,3-dimethylimidazolidin-2-ylidene) Phosphoramidate linkage
  modified_base order(2..14,15^16,18..25): mod_base = OTHER; note = Phosphorothioate linkage
  modified_base 16^17: mod_base = OTHER; note = Methylphosphonate linkage
  modified_base 16: mod_base = m5u; note = 5-methyluridine
  misc_feature 1..26: note = RM106394
tgcacctctgaggantgggttcattt

SEQ ID NO: 102 - DNA, 25 bp, synthetic construct
  source 1..25: mol_type = other DNA
  misc_feature 14..15: note = DNA
  misc_feature order(1..13,16..25): note = RNA
  modified_base order(13,18): mod_base = OTHER; note = 2-Prime-O-Methoxyethyl modified nucleoside
  modified_base 14: mod_base = OTHER; note = DNA nucleotide carrying a 6-amino-5-nitro-3-yl-2(1H)-pyridone nucleobase
  modified_base order(7..12,17,19..24): mod_base = OTHER; note = 2-Prime-Fluoro modified nucleoside
  modified_base order(1..6,16,25): mod_base = OTHER; note = 2-Prime-O-Methyl modified nucleoside
  modified_base order(1^2,24^25): mod_base = OTHER; note = (1,3-dimethylimidazolidin-2-ylidene) Phosphoramidate linkage
  modified_base order(2..13,14^15,17..24): mod_base = OTHER; note = Phosphorothioate linkage
  modified_base 15^16: mod_base = OTHER; note = Methylphosphonate linkage
  modified_base 15: mod_base = m5u; note = 5-methyluridine
  misc_feature 1..25: note = RM106395
gcacctctgaggantgggttcattt

SEQ ID NO: 103 - DNA, 29 bp, synthetic construct
  source 1..29: mol_type = other DNA
  misc_feature 19..20: note = DNA
  misc_feature order(1..18,21..29): note = RNA
  modified_base order(1..4,18,23): mod_base = OTHER; note = 2-Prime-O-Methoxyethyl modified nucleoside
  modified_base 5: mod_base = OTHER; note = 2-Prime-O-Methoxyethyl modified 5-methyl Uridine
  modified_base 19: mod_base = OTHER; note = DNA nucleotide carrying a 6-amino-5-nitro-3-yl-2(1H)-pyridone nucleobase
  modified_base order(12..17,22,24..29): mod_base = OTHER; note = 2-Prime-Fluoro modified nucleoside
  modified_base order(6..11,21): mod_base = OTHER; note = 2-Prime-O-Methyl modified nucleoside
  modified_base order(1^2,28^29): mod_base = OTHER; note = (1,3-dimethylimidazolidin-2-ylidene) Phosphoramidate linkage
  modified_base order(6..18,19^20,22..28): mod_base = OTHER; note = Phosphorothioate linkage
  modified_base 20^21: mod_base = OTHER; note = Methylphosphonate linkage
  modified_base 20: mod_base = m5u; note = 5-methyluridine
  misc_feature 1..29: note = RM106396
agaatgcacctctgaggantgggttcatt

SEQ ID NO: 104 - DNA, 27 bp, synthetic construct
  source 1..27: mol_type = other DNA
  misc_feature 17..18: note = DNA
  misc_feature order(1..16,19..27): note = RNA
  modified_base order(1..2,16,21): mod_base = OTHER; note = 2-Prime-O-Methoxyethyl modified nucleoside
  modified_base 3: mod_base = OTHER; note = 2-Prime-O-Methoxyethyl modified 5-methyl Uridine
  modified_base 17: mod_base = OTHER; note = DNA nucleotide carrying a 6-amino-5-nitro-3-yl-2(1H)-pyridone nucleobase
  modified_base order(10..15,20,22..27): mod_base = OTHER; note = 2-Prime-Fluoro modified nucleoside
  modified_base order(4..9,19): mod_base = OTHER; note = 2-Prime-O-Methyl modified nucleoside
  modified_base order(1^2,26^27): mod_base = OTHER; note = (1,3-dimethylimidazolidin-2-ylidene) Phosphoramidate linkage
  modified_base order(4..16,17^18,20..26): mod_base = OTHER; note = Phosphorothioate linkage
  modified_base 18^19: mod_base = OTHER; note = Methylphosphonate linkage
  modified_base 18: mod_base = m5u; note = 5-methyluridine
  misc_feature 1..27: note = RM106397
aatgcacctctgaggantgggttcatt

SEQ ID NO: 105 - DNA, 28 bp, synthetic construct
  source 1..28: mol_type = other DNA
  misc_feature 19..20: note = DNA
  misc_feature order(1..18,21..28): note = RNA
  modified_base order(1..4,18,23): mod_base = OTHER; note = 2-Prime-O-Methoxyethyl modified nucleoside
  modified_base 5: mod_base = OTHER; note = 2-Prime-O-Methoxyethyl modified 5-methyl Uridine
  modified_base 19: mod_base = OTHER; note = DNA nucleotide carrying a 6-amino-5-nitro-3-yl-2(1H)-pyridone nucleobase
  modified_base order(12..17,22,24..28): mod_base = OTHER; note = 2-Prime-Fluoro modified nucleoside
  modified_base order(6..11,21): mod_base = OTHER; note = 2-Prime-O-Methyl modified nucleoside
  modified_base order(1^2,27^28): mod_base = OTHER; note = (1,3-dimethylimidazolidin-2-ylidene) Phosphoramidate linkage
  modified_base order(6..18,19^20,22..27): mod_base = OTHER; note = Phosphorothioate linkage
  modified_base 20^21: mod_base = OTHER; note = Methylphosphonate linkage
  modified_base 20: mod_base = m5u; note = 5-methyluridine
  misc_feature 1..28: note = RM106398
agaatgcacctctgaggantgggttcat

SEQ ID NO: 106 - DNA, 27 bp, synthetic construct
  source 1..27: mol_type = other DNA
  misc_feature 18..19: note = DNA
  misc_feature order(1..17,20..27): note = RNA
  modified_base order(1..3,17,22): mod_base = OTHER; note = 2-Prime-O-Methoxyethyl modified nucleoside
  modified_base 4: mod_base = OTHER; note = 2-Prime-O-Methoxyethyl modified 5-methyl Uridine
  modified_base 18: mod_base = OTHER; note = DNA nucleotide carrying a 6-amino-5-nitro-3-yl-2(1H)-pyridone nucleobase
  modified_base order(11..16,21,23..27): mod_base = OTHER; note = 2-Prime-Fluoro modified nucleoside
  modified_base order(5..10,20): mod_base = OTHER; note = 2-Prime-O-Methyl modified nucleoside
  modified_base order(1^2,26^27): mod_base = OTHER; note = (1,3-dimethylimidazolidin-2-ylidene) Phosphoramidate linkage
  modified_base order(5..17,18^19,21..26): mod_base = OTHER; note = Phosphorothioate linkage
  modified_base 19^20: mod_base = OTHER; note = Methylphosphonate linkage
  modified_base 19: mod_base = m5u; note = 5-methyluridine
  misc_feature 1..27: note = RM106399
gaatgcacctctgaggantgggttcat

SEQ ID NO: 107 - DNA, 26 bp, synthetic construct
  source 1..26: mol_type = other DNA
  misc_feature 17..18: note = DNA
  misc_feature order(1..16,19..26): note = RNA
  modified_base order(1..2,16,21): mod_base = OTHER; note = 2-Prime-O-Methoxyethyl modified nucleoside
  modified_base 3: mod_base = OTHER; note = 2-Prime-O-Methoxyethyl modified 5-methyl Uridine
  modified_base 17: mod_base = OTHER; note = DNA nucleotide carrying a 6-amino-5-nitro-3-yl-2(1H)-pyridone nucleobase
  modified_base order(10..15,20,22..26): mod_base = OTHER; note = 2-Prime-Fluoro modified nucleoside
  modified_base order(4..9,19): mod_base = OTHER; note = 2-Prime-O-Methyl modified nucleoside
  modified_base order(1^2,25^26): mod_base = OTHER; note = (1,3-dimethylimidazolidin-2-ylidene) Phosphoramidate linkage
  modified_base order(4..16,17^18,20..25): mod_base = OTHER; note = Phosphorothioate linkage
  modified_base 18^19: mod_base = OTHER; note = Methylphosphonate linkage
  modified_base 18: mod_base = m5u; note = 5-methyluridine
  misc_feature 1..26: note = RM106400
aatgcacctctgaggantgggttcat

SEQ ID NO: 108 - DNA, 25 bp, synthetic construct
  source 1..25: mol_type = other DNA
  misc_feature 16..17: note = DNA
  misc_feature order(1..15,18..25): note = RNA
  modified_base order(1,15,20): mod_base = OTHER; note = 2-Prime-O-Methoxyethyl modified nucleoside
  modified_base 2: mod_base = OTHER; note = 2-Prime-O-Methoxyethyl modified 5-methyl Uridine
  modified_base 16: mod_base = OTHER; note = DNA nucleotide carrying a 6-amino-5-nitro-3-yl-2(1H)-pyridone nucleobase
  modified_base order(9..14,19,21..25): mod_base = OTHER; note = 2-Prime-Fluoro modified nucleoside
  modified_base order(3..8,18): mod_base = OTHER; note = 2-Prime-O-Methyl modified nucleoside
  modified_base order(1^2,24^25): mod_base = OTHER; note = (1,3-dimethylimidazolidin-2-ylidene) Phosphoramidate linkage
  modified_base order(3..15,16^17,19..24): mod_base = OTHER; note = Phosphorothioate linkage
  modified_base 17^18: mod_base = OTHER; note = Methylphosphonate linkage
  modified_base 17: mod_base = m5u; note = 5-methyluridine
  misc_feature 1..25: note = RM106401
atgcacctctgaggantgggttcat

SEQ ID NO: 109 - DNA, 23 bp, synthetic construct
  source 1..23: mol_type = other DNA
  misc_feature 18..19: note = DNA
  misc_feature order(1..17,20..23): note = RNA
  modified_base 17: mod_base = OTHER; note = 2-Prime-O-Methoxyethyl modified nucleoside
  modified_base 18: mod_base = OTHER; note = DNA nucleotide carrying a 6-amino-5-nitro-3-yl-2(1H)-pyridone nucleobase
  modified_base 21: mod_base = OTHER; note = 2-Prime-Fluoro modified nucleoside
  modified_base order(1..16,20,22..23): mod_base = OTHER; note = 2-Prime-O-Methyl modified nucleoside
  modified_base order(1^2,22^23): mod_base = OTHER; note = (1,3-dimethylimidazolidin-2-ylidene) Phosphoramidate linkage
  modified_base order(2..19,20..22): mod_base = OTHER; note = Phosphorothioate linkage
  modified_base 19^20: mod_base = OTHER; note = Methylphosphonate linkage
  misc_feature 1..23: note = RM109901
ggtcaaacctctgaggantgggt

SEQ ID NO: 110 - DNA, 23 bp, synthetic construct
  source 1..23: mol_type = other DNA
  misc_feature 15..16: note = DNA
  misc_feature order(1..14,17..23): note = RNA
  modified_base 14: mod_base = OTHER; note = 2-Prime-O-Methoxyethyl modified nucleoside
  modified_base 15: mod_base = OTHER; note = DNA nucleotide carrying a 6-amino-5-nitro-3-yl-2(1H)-pyridone nucleobase
  modified_base 18: mod_base = OTHER; note = 2-Prime-Fluoro modified nucleoside
  modified_base order(1..13,17,19..23): mod_base = OTHER; note = 2-Prime-O-Methyl modified nucleoside
  modified_base order(1^2,22^23): mod_base = OTHER; note = (1,3-dimethylimidazolidin-2-ylidene) Phosphoramidate linkage
  modified_base order(2..16,17..22): mod_base = OTHER; note = Phosphorothioate linkage
  modified_base 16^17: mod_base = OTHER; note = Methylphosphonate linkage
  misc_feature 1..23: note = RM109902
caaacctctgaggantgggttca

SEQ ID NO: 111 - DNA, 23 bp, synthetic construct
  source 1..23: mol_type = other DNA
  misc_feature 12..13: note = DNA
  misc_feature order(1..11,14..23): note = RNA
  modified_base 11: mod_base = OTHER; note = 2-Prime-O-Methoxyethyl modified nucleoside
  modified_base 12: mod_base = OTHER; note = DNA nucleotide carrying a 6-amino-5-nitro-3-yl-2(1H)-pyridone nucleobase
  modified_base 15: mod_base = OTHER; note = 2-Prime-Fluoro modified nucleoside
  modified_base order(1..10,14,16..23): mod_base = OTHER; note = 2-Prime-O-Methyl modified nucleoside
  modified_base order(1^2,22^23): mod_base = OTHER; note = (1,3-dimethylimidazolidin-2-ylidene) Phosphoramidate linkage
  modified_base order(2..13,14..22): mod_base = OTHER; note = Phosphorothioate linkage
  modified_base 13^14: mod_base = OTHER; note = Methylphosphonate linkage
  misc_feature 1..23: note = RM109903
acctctgaggantgggttcattt

SEQ ID NO: 112 - DNA, 23 bp, synthetic construct
  source 1..23: mol_type = other DNA
  misc_feature 9..10: note = DNA
  misc_feature order(1..8,11..23): note = RNA
  modified_base 8: mod_base = OTHER; note = 2-Prime-O-Methoxyethyl modified nucleoside
  modified_base 9: mod_base = OTHER; note = DNA nucleotide carrying a 6-amino-5-nitro-3-yl-2(1H)-pyridone nucleobase
  modified_base 12: mod_base = OTHER; note = 2-Prime-Fluoro modified nucleoside
  modified_base order(1..7,11,13..23): mod_base = OTHER; note = 2-Prime-O-Methyl modified nucleoside
  modified_base order(1^2,22^23): mod_base = OTHER; note = (1,3-dimethylimidazolidin-2-ylidene) Phosphoramidate linkage
  modified_base order(2..10,11..22): mod_base = OTHER; note = Phosphorothioate linkage
  modified_base 10^11: mod_base = OTHER; note = Methylphosphonate linkage
  misc_feature 1..23: note = RM109904
tctgaggantgggttcatttttc

SEQ ID NO: 113 - DNA, 23 bp, synthetic construct
  source 1..23: mol_type = other DNA
  misc_feature 6..7: note = DNA
  misc_feature order(1..5,8..23): note = RNA
  modified_base 5: mod_base = OTHER; note = 2-Prime-O-Methoxyethyl modified nucleoside
  modified_base 6: mod_base = OTHER; note = DNA nucleotide carrying a 6-amino-5-nitro-3-yl-2(1H)-pyridone nucleobase
  modified_base 9: mod_base = OTHER; note = 2-Prime-Fluoro modified nucleoside
  modified_base order(1..4,8,10..23): mod_base = OTHER; note = 2-Prime-O-Methyl modified nucleoside
  modified_base order(1^2,22^23): mod_base = OTHER; note = (1,3-dimethylimidazolidin-2-ylidene) Phosphoramidate linkage
  modified_base order(2..7,8..22): mod_base = OTHER; note = Phosphorothioate linkage
  modified_base 7^8: mod_base = OTHER; note = Methylphosphonate linkage
  misc_feature 1..23: note = RM109905
gaggantgggttcatttttcttg

SEQ ID NO: 114 - DNA, 26 bp, synthetic construct
  source 1..26: mol_type = other DNA
  misc_feature 22..23: note = DNA
  misc_feature order(1..21,24..26): note = RNA
  modified_base 21: mod_base = OTHER; note = 2-Prime-O-Methoxyethyl modified nucleoside
  modified_base 22: mod_base = OTHER; note = DNA nucleotide carrying a 6-amino-5-nitro-3-yl-2(1H)-pyridone nucleobase
  modified_base 25: mod_base = OTHER; note = 2-Prime-Fluoro modified nucleoside
  modified_base order(1..20,24,26): mod_base = OTHER; note = 2-Prime-O-Methyl modified nucleoside
  modified_base order(1^2,25^26): mod_base = OTHER; note = (1,3-dimethylimidazolidin-2-ylidene) Phosphoramidate linkage
  modified_base order(2..23,24^25): mod_base = OTHER; note = Phosphorothioate linkage
  modified_base 23^24: mod_base = OTHER; note = Methylphosphonate linkage
  misc_feature 1..26: note = RM109906
attcggtcaaacctctgaggantggg

SEQ ID NO: 115 - DNA, 26 bp, synthetic construct
  source 1..26: mol_type = other DNA
  misc_feature 19..20: note = DNA
  misc_feature order(1..18,21..26): note = RNA
  modified_base 18: mod_base = OTHER; note = 2-Prime-O-Methoxyethyl modified nucleoside
  modified_base 19: mod_base = OTHER; note = DNA nucleotide carrying a 6-amino-5-nitro-3-yl-2(1H)-pyridone nucleobase
  modified_base 22: mod_base = OTHER; note = 2-Prime-Fluoro modified nucleoside
  modified_base order(1..17,21,23..26): mod_base = OTHER; note = 2-Prime-O-Methyl modified nucleoside
  modified_base order(1^2,25^26): mod_base = OTHER; note = (1,3-dimethylimidazolidin-2-ylidene) Phosphoramidate linkage
  modified_base order(2..20,21..25): mod_base = OTHER; note = Phosphorothioate linkage
  modified_base 20^21: mod_base = OTHER; note = Methylphosphonate linkage
  misc_feature 1..26: note = RM109907
cggtcaaacctctgaggantgggttc

SEQ ID NO: 116 - DNA, 26 bp, synthetic construct
  source 1..26: mol_type = other DNA
  misc_feature 16..17: note = DNA
  misc_feature order(1..15,18..26): note = RNA
  modified_base 15: mod_base = OTHER; note = 2-Prime-O-Methoxyethyl modified nucleoside
  modified_base 16: mod_base = OTHER; note = DNA nucleotide carrying a 6-amino-5-nitro-3-yl-2(1H)-pyridone nucleobase
  modified_base 19: mod_base = OTHER; note = 2-Prime-Fluoro modified nucleoside
  modified_base order(1..14,18,20..26): mod_base = OTHER; note = 2-Prime-O-Methyl modified nucleoside
  modified_base order(1^2,25^26): mod_base = OTHER; note = (1,3-dimethylimidazolidin-2-ylidene) Phosphoramidate linkage
  modified_base order(2..17,18..25): mod_base = OTHER; note = Phosphorothioate linkage
  modified_base 17^18: mod_base = OTHER; note = Methylphosphonate linkage
  misc_feature 1..26: note = RM109908
tcaaacctctgaggantgggttcatt

SEQ ID NO: 117 - DNA, 26 bp, synthetic construct
  source 1..26: mol_type = other DNA
  misc_feature 13..14: note = DNA
  misc_feature order(1..12,15..26): note = RNA
  modified_base 12: mod_base = OTHER; note = 2-Prime-O-Methoxyethyl modified nucleoside
  modified_base 13: mod_base = OTHER; note = DNA nucleotide carrying a 6-amino-5-nitro-3-yl-2(1H)-pyridone nucleobase
  modified_base 16: mod_base = OTHER; note = 2-Prime-Fluoro modified nucleoside
  modified_base order(1..11,15,17..26): mod_base = OTHER; note = 2-Prime-O-Methyl modified nucleoside
  modified_base order(1^2,25^26): mod_base = OTHER; note = (1,3-dimethylimidazolidin-2-ylidene) Phosphoramidate linkage
  modified_base order(2..14,15..25): mod_base = OTHER; note = Phosphorothioate linkage
  modified_base 14^15: mod_base = OTHER; note = Methylphosphonate linkage
  misc_feature 1..26: note = RM109909
aacctctgaggantgggttcattttt

SEQ ID NO: 118 - DNA, 26 bp, synthetic construct
  source 1..26: mol_type = other DNA
  misc_feature 10..11: note = DNA
  misc_feature order(1..9,12..26): note = RNA
  modified_base 9: mod_base = OTHER; note = 2-Prime-O-Methoxyethyl modified nucleoside
  modified_base 10: mod_base = OTHER; note = DNA nucleotide carrying a 6-amino-5-nitro-3-yl-2(1H)-pyridone nucleobase
  modified_base 13: mod_base = OTHER; note = 2-Prime-Fluoro modified nucleoside
  modified_base order(1..8,12,14..26): mod_base = OTHER; note = 2-Prime-O-Methyl modified nucleoside
  modified_base order(1^2,25^26): mod_base = OTHER; note = (1,3-dimethylimidazolidin-2-ylidene) Phosphoramidate linkage
  modified_base order(2..11,12..25): mod_base = OTHER; note = Phosphorothioate linkage
  modified_base 11^12: mod_base = OTHER; note = Methylphosphonate linkage
  misc_feature 1..26: note = RM109910
ctctgaggantgggttcatttttctt

SEQ ID NO: 119 - DNA, 26 bp, synthetic construct
  source 1..26: mol_type = other DNA
  misc_feature 7..8: note = DNA
  misc_feature order(1..6,9..26): note = RNA
  modified_base 6: mod_base = OTHER; note = 2-Prime-O-Methoxyethyl modified nucleoside
  modified_base 7: mod_base = OTHER; note = DNA nucleotide carrying a 6-amino-5-nitro-3-yl-2(1H)-pyridone nucleobase
  modified_base 10: mod_base = OTHER; note = 2-Prime-Fluoro modified nucleoside
  modified_base order(1..5,9,11..26): mod_base = OTHER; note = 2-Prime-O-Methyl modified nucleoside
  modified_base order(1^2,25^26): mod_base = OTHER; note = (1,3-dimethylimidazolidin-2-ylidene) Phosphoramidate linkage
  modified_base order(2..8,9..25): mod_base = OTHER; note = Phosphorothioate linkage
  modified_base 8^9: mod_base = OTHER; note = Methylphosphonate linkage
  misc_feature 1..26: note = RM109911
tgaggantgggttcatttttcttgtc

SEQ ID NO: 120 - DNA, 29 bp, synthetic construct
  source 1..29: mol_type = other DNA
  misc_feature 24..25: note = DNA
  misc_feature order(1..23,26..29): note = RNA
  modified_base 23: mod_base = OTHER; note = 2-Prime-O-Methoxyethyl modified nucleoside
  modified_base 24: mod_base = OTHER; note = DNA nucleotide carrying a 6-amino-5-nitro-3-yl-2(1H)-pyridone nucleobase
  modified_base 27: mod_base = OTHER; note = 2-Prime-Fluoro modified nucleoside
  modified_base order(1..22,26,28..29): mod_base = OTHER; note = 2-Prime-O-Methyl modified nucleoside
  modified_base order(1^2,28^29): mod_base = OTHER; note = (1,3-dimethylimidazolidin-2-ylidene) Phosphoramidate linkage
  modified_base order(2..25,26..28): mod_base = OTHER; note = Phosphorothioate linkage
  modified_base 25^26: mod_base = OTHER; note = Methylphosphonate linkage
  misc_feature 1..29: note = RM109912
caattcggtcaaacctctgaggantgggt

SEQ ID NO: 121 - DNA, 29 bp, synthetic construct
  source 1..29: mol_type = other DNA
  misc_feature 21..22: note = DNA
  misc_feature order(1..20,23..29): note = RNA
  modified_base 20: mod_base = OTHER; note = 2-Prime-O-Methoxyethyl modified nucleoside
  modified_base 21: mod_base = OTHER; note = DNA nucleotide carrying a 6-amino-5-nitro-3-yl-2(1H)-pyridone nucleobase
  modified_base 24: mod_base = OTHER; note = 2-Prime-Fluoro modified nucleoside
  modified_base order(1..19,23,25..29): mod_base = OTHER; note = 2-Prime-O-Methyl modified nucleoside
  modified_base order(1^2,28^29): mod_base = OTHER; note = (1,3-dimethylimidazolidin-2-ylidene) Phosphoramidate linkage
  modified_base order(2..22,23..28): mod_base = OTHER; note = Phosphorothioate linkage
  modified_base 22^23: mod_base = OTHER; note = Methylphosphonate linkage
  misc_feature 1..29: note = RM109913
ttcggtcaaacctctgaggantgggttca

SEQ ID NO: 122 - DNA, 29 bp, synthetic construct
  source 1..29: mol_type = other DNA
  misc_feature 18..19: note = DNA
  misc_feature order(1..17,20..29): note = RNA
  modified_base 17: mod_base = OTHER; note = 2-Prime-O-Methoxyethyl modified nucleoside
  modified_base 18: mod_base = OTHER; note = DNA nucleotide carrying a 6-amino-5-nitro-3-yl-2(1H)-pyridone nucleobase
  modified_base 21: mod_base = OTHER; note = 2-Prime-Fluoro modified nucleoside
  modified_base order(1..16,20,22..29): mod_base = OTHER; note = 2-Prime-O-Methyl modified nucleoside
  modified_base order(1^2,28^29): mod_base = OTHER; note = (1,3-dimethylimidazolidin-2-ylidene) Phosphoramidate linkage
  modified_base order(2..19,20..28): mod_base = OTHER; note = Phosphorothioate linkage
  modified_base 19^20: mod_base = OTHER; note = Methylphosphonate linkage
  misc_feature 1..29: note = RM109914
ggtcaaacctctgaggantgggttcattt

SEQ ID NO: 123 - DNA, 29 bp, synthetic construct
  source 1..29: mol_type = other DNA
  misc_feature 15..16: note = DNA
  misc_feature order(1..14,17..29): note = RNA
  modified_base 14: mod_base = OTHER; note = 2-Prime-O-Methoxyethyl modified nucleoside
  modified_base 15: mod_base = OTHER; note = DNA nucleotide carrying a 6-amino-5-nitro-3-yl-2(1H)-pyridone nucleobase
  modified_base 18: mod_base = OTHER; note = 2-Prime-Fluoro modified nucleoside
  modified_base order(1..13,17,19..29): mod_base = OTHER; note = 2-Prime-O-Methyl modified nucleoside
  modified_base order(1^2,28^29): mod_base = OTHER; note = (1,3-dimethylimidazolidin-2-ylidene) Phosphoramidate linkage
  modified_base order(2..16,17..28): mod_base = OTHER; note = Phosphorothioate linkage
  modified_base 16^17: mod_base = OTHER; note = Methylphosphonate linkage
  misc_feature 1..29: note = RM109915
caaacctctgaggantgggttcatttttc

SEQ ID NO: 124 - DNA, 29 bp, synthetic construct
  source 1..29: mol_type = other DNA
  misc_feature 12..13: note = DNA
  misc_feature order(1..11,14..29): note = RNA
  modified_base 11: mod_base = OTHER; note = 2-Prime-O-Methoxyethyl modified nucleoside
  modified_base 12: mod_base = OTHER; note = DNA nucleotide carrying a 6-amino-5-nitro-3-yl-2(1H)-pyridone nucleobase
  modified_base 15: mod_base = OTHER; note = 2-Prime-Fluoro modified nucleoside
  modified_base order(1..10,14,16..29): mod_base = OTHER; note = 2-Prime-O-Methyl modified nucleoside
  modified_base order(1^2,28^29): mod_base = OTHER; note = (1,3-dimethylimidazolidin-2-ylidene) Phosphoramidate linkage
  modified_base order(2..13,14..28): mod_base = OTHER; note = Phosphorothioate linkage
  modified_base 13^14: mod_base = OTHER; note = Methylphosphonate linkage
  misc_feature 1..29: note = RM109916
acctctgaggantgggttcatttttcttg

SEQ ID NO: 125 - DNA, 29 bp, synthetic construct
  source 1..29: mol_type = other DNA
  misc_feature 9..10: note = DNA
  misc_feature order(1..8,11..29): note = RNA
  modified_base 8: mod_base = OTHER; note = 2-Prime-O-Methoxyethyl modified nucleoside
  modified_base 9: mod_base = OTHER; note = DNA nucleotide carrying a 6-amino-5-nitro-3-yl-2(1H)-pyridone nucleobase
  modified_base 12: mod_base = OTHER; note = 2-Prime-Fluoro modified nucleoside
  modified_base order(1..7,11,13..29): mod_base = OTHER; note = 2-Prime-O-Methyl modified nucleoside
  modified_base order(1^2,28^29): mod_base = OTHER; note = (1,3-dimethylimidazolidin-2-ylidene) Phosphoramidate linkage
  modified_base order(2..10,11..28): mod_base = OTHER; note = Phosphorothioate linkage
  modified_base 10^11: mod_base = OTHER; note = Methylphosphonate linkage
  misc_feature 1..29: note = RM109917
tctgaggantgggttcatttttcttgtct

SEQ ID NO: 126 - DNA, 29 bp, synthetic construct
  source 1..29: mol_type = other DNA
  misc_feature 6..7: note = DNA
  misc_feature order(1..5,8..29): note = RNA
  modified_base 5: mod_base = OTHER; note = 2-Prime-O-Methoxyethyl modified nucleoside
  modified_base 6: mod_base = OTHER; note = DNA nucleotide carrying a 6-amino-5-nitro-3-yl-2(1H)-pyridone nucleobase
  modified_base 9: mod_base = OTHER; note = 2-Prime-Fluoro modified nucleoside
  modified_base order(1..4,8,10..29): mod_base = OTHER; note = 2-Prime-O-Methyl modified nucleoside
  modified_base order(1^2,28^29): mod_base = OTHER; note = (1,3-dimethylimidazolidin-2-ylidene) Phosphoramidate linkage
  modified_base order(2..7,8..28): mod_base = OTHER; note = Phosphorothioate linkage
  modified_base 7^8: mod_base = OTHER; note = Methylphosphonate linkage
  misc_feature 1..29: note = RM109918
gaggantgggttcatttttcttgtctctt

SEQ ID NO: 127 - DNA, 32 bp, synthetic construct
  source 1..32: mol_type = other DNA
  misc_feature 28..29: note = DNA
  misc_feature order(1..27,30..32): note = RNA
  modified_base 27: mod_base = OTHER; note = 2-Prime-O-Methoxyethyl modified nucleoside
  modified_base 28: mod_base = OTHER; note = DNA nucleotide carrying a 6-amino-5-nitro-3-yl-2(1H)-pyridone nucleobase
  modified_base 31: mod_base = OTHER; note = 2-Prime-Fluoro modified nucleoside
  modified_base order(1..26,30,32): mod_base = OTHER; note = 2-Prime-O-Methyl modified nucleoside
  modified_base order(1^2,31^32): mod_base = OTHER; note = (1,3-dimethylimidazolidin-2-ylidene) Phosphoramidate linkage
  modified_base order(2..29,30^31): mod_base = OTHER; note = Phosphorothioate linkage
  modified_base 29^30: mod_base = OTHER; note = Methylphosphonate linkage
  misc_feature 1..32: note = RM109919
tgtgcaattcggtcaaacctctgaggantggg

SEQ ID NO: 128 - DNA, 32 bp, synthetic construct
  source 1..32: mol_type = other DNA
  misc_feature 25..26: note = DNA
  misc_feature order(1..24,27..32): note = RNA
  modified_base 24: mod_base = OTHER; note = 2-Prime-O-Methoxyethyl modified nucleoside
  modified_base 25: mod_base = OTHER; note = DNA nucleotide carrying a 6-amino-5-nitro-3-yl-2(1H)-pyridone nucleobase
  modified_base 28: mod_base = OTHER; note = 2-Prime-Fluoro modified nucleoside
  modified_base order(1..23,27,29..32): mod_base = OTHER; note = 2-Prime-O-Methyl modified nucleoside
  modified_base order(1^2,31^32): mod_base = OTHER; note = (1,3-dimethylimidazolidin-2-ylidene) Phosphoramidate linkage
  modified_base order(2..26,27..31): mod_base = OTHER; note = Phosphorothioate linkage
  modified_base 26^27: mod_base = OTHER; note = Methylphosphonate linkage
  misc_feature 1..32: note = RM109920
gcaattcggtcaaacctctgaggantgggttc

SEQ ID NO: 129 - DNA, 32 bp, synthetic construct
  source 1..32: mol_type = other DNA
  misc_feature 22..23: note = DNA
  misc_feature order(1..21,24..32): note = RNA
  modified_base 21: mod_base = OTHER; note = 2-Prime-O-Methoxyethyl modified nucleoside
  modified_base 22: mod_base = OTHER; note = DNA nucleotide carrying a 6-amino-5-nitro-3-yl-2(1H)-pyridone nucleobase
  modified_base 25: mod_base = OTHER; note = 2-Prime-Fluoro modified nucleoside
  modified_base order(1..20,24,26..32): mod_base = OTHER; note = 2-Prime-O-Methyl modified nucleoside
  modified_base order(1^2,31^32): mod_base = OTHER; note = (1,3-dimethylimidazolidin-2-ylidene) Phosphoramidate linkage
  modified_base order(2..23,24..31): mod_base = OTHER; note = Phosphorothioate linkage
  modified_base 23^24: mod_base = OTHER; note = Methylphosphonate linkage
  misc_feature 1..32: note = RM109921
attcggtcaaacctctgaggantgggttcatt

SEQ ID NO: 130 - DNA, 32 bp, synthetic construct; identical to SEQ ID NO: 19
  source 1..32: mol_type = other DNA
  misc_feature 19..20: note = DNA
  misc_feature order(1..18,21..32): note = RNA
  modified_base 18: mod_base = OTHER; note = 2-Prime-O-Methoxyethyl modified nucleoside
  modified_base 19: mod_base = OTHER; note = DNA nucleotide carrying a 6-amino-5-nitro-3-yl-2(1H)-pyridone nucleobase
  modified_base 22: mod_base = OTHER; note = 2-Prime-Fluoro modified nucleoside
  modified_base order(1..17,21,23..32): mod_base = OTHER; note = 2-Prime-O-Methyl modified nucleoside
  modified_base order(1^2,31^32): mod_base = OTHER; note = (1,3-dimethylimidazolidin-2-ylidene) Phosphoramidate linkage
  modified_base order(2..20,21..31): mod_base = OTHER; note = Phosphorothioate linkage
  modified_base 20^21: mod_base = OTHER; note = Methylphosphonate linkage
  misc_feature 1..32: note = RM109922

SEQ ID NO: 131 - DNA, 32 bp, synthetic construct
  source 1..32: mol_type = other DNA
  misc_feature 16..17: note = DNA
  misc_feature order(1..15,18..32): note = RNA
  modified_base 15: mod_base = OTHER; note = 2-Prime-O-Methoxyethyl modified nucleoside
  modified_base 16: mod_base = OTHER; note = DNA nucleotide carrying a 6-amino-5-nitro-3-yl-2(1H)-pyridone nucleobase
  modified_base 19: mod_base = OTHER; note = 2-Prime-Fluoro modified nucleoside
  modified_base order(1..14,18,20..32): mod_base = OTHER; note = 2-Prime-O-Methyl modified nucleoside
  modified_base order(1^2,31^32): mod_base = OTHER; note = (1,3-dimethylimidazolidin-2-ylidene) Phosphoramidate linkage
  modified_base order(2..17,18..31): mod_base = OTHER; note = Phosphorothioate linkage
  modified_base 17^18: mod_base = OTHER; note = Methylphosphonate linkage
  misc_feature 1..32: note = RM109923
tcaaacctctgaggantgggttcatttttctt

SEQ ID NO: 132 - DNA, 32 bp, synthetic construct
  source 1..32: mol_type = other DNA
  misc_feature 13..14: note = DNA
  misc_feature order(1..12,15..32): note = RNA
  modified_base 12: mod_base = OTHER; note = 2-Prime-O-Methoxyethyl modified nucleoside
  modified_base 13: mod_base = OTHER; note = DNA nucleotide carrying a 6-amino-5-nitro-3-yl-2(1H)-pyridone nucleobase
  modified_base 16: mod_base = OTHER; note = 2-Prime-Fluoro modified nucleoside
  modified_base order(1..11,15,17..32): mod_base = OTHER; note = 2-Prime-O-Methyl modified nucleoside
  modified_base order(1^2,31^32): mod_base = OTHER; note = (1,3-dimethylimidazolidin-2-ylidene) Phosphoramidate linkage
  modified_base order(2..14,15..31): mod_base = OTHER; note = Phosphorothioate linkage
  modified_base 14^15: mod_base = OTHER; note = Methylphosphonate linkage
  misc_feature 1..32: note = RM109924
aacctctgaggantgggttcatttttcttgtc

SEQ ID NO: 133 - DNA, 32 bp, synthetic construct
  source 1..32: mol_type = other DNA
  misc_feature 10..11: note = DNA
  misc_feature order(1..9,12..32): note = RNA
  modified_base 9: mod_base = OTHER; note = 2-Prime-O-Methoxyethyl modified nucleoside
  modified_base 10: mod_base = OTHER; note = DNA nucleotide carrying a 6-amino-5-nitro-3-yl-2(1H)-pyridone nucleobase
  modified_base 13: mod_base = OTHER; note = 2-Prime-Fluoro modified nucleoside
  modified_base order(1..8,12,14..32): mod_base = OTHER; note = 2-Prime-O-Methyl modified nucleoside
  modified_base order(1^2,31^32): mod_base = OTHER; note = (1,3-dimethylimidazolidin-2-ylidene) Phosphoramidate linkage
  modified_base order(2..11,12..31): mod_base = OTHER; note = Phosphorothioate linkage
  modified_base 11^12: mod_base = OTHER; note = Methylphosphonate linkage
  misc_feature 1..32: note = RM109925
ctctgaggantgggttcatttttcttgtctct

SEQ ID NO: 134 - DNA, 32 bp, synthetic construct
  source 1..32: mol_type = other DNA
  misc_feature 7..8: note = DNA
  misc_feature order(1..6,9..32): note = RNA
  modified_base 6: mod_base = OTHER; note = 2-Prime-O-Methoxyethyl modified nucleoside
  modified_base 7: mod_base = OTHER; note = DNA nucleotide carrying a 6-amino-5-nitro-3-yl-2(1H)-pyridone nucleobase
  modified_base 10: mod_base = OTHER; note = 2-Prime-Fluoro modified nucleoside
  modified_base order(1..5,9,11..32): mod_base = OTHER; note = 2-Prime-O-Methyl modified nucleoside
  modified_base order(1^2,31^32): mod_base = OTHER; note = (1,3-dimethylimidazolidin-2-ylidene) Phosphoramidate linkage
  modified_base order(2..8,9..31): mod_base = OTHER; note = Phosphorothioate linkage
  modified_base 8^9: mod_base = OTHER; note = Methylphosphonate linkage
  misc_feature 1..32: note = RM109926
tgaggantgggttcatttttcttgtctcttga

SEQ ID NO: 135 - DNA, 26 bp, synthetic construct
  source 1..26: mol_type = other DNA
  misc_feature 16..17: note = DNA
  misc_feature order(1..15,18..26): note = RNA
  modified_base 15: mod_base = OTHER; note = 2-Prime-O-Methoxyethyl modified nucleoside
  modified_base 16: mod_base = OTHER; note = DNA nucleotide carrying a 6-amino-5-nitro-3-yl-2(1H)-pyridone nucleobase
  modified_base order(9,11,13,19,22,24,26): mod_base = OTHER; note = 2-Prime-Fluoro modified nucleoside
  modified_base order(1..8,10,12,14,18,20..21,23,25): mod_base = OTHER; note = 2-Prime-O-Methyl modified nucleoside
  modified_base order(1^2,25^26): mod_base = OTHER; note = (1,3-dimethylimidazolidin-2-ylidene) Phosphoramidate linkage
  modified_base order(2..17,18..25): mod_base = OTHER; note = Phosphorothioate linkage
  modified_base 17^18: mod_base = OTHER; note = Methylphosphonate linkage
  misc_feature 1..26: note = RM109927
tcaaacctctgaggantgggttcatt

SEQ ID NO: 136 - DNA, 26 bp, synthetic construct
  source 1..26: mol_type = other DNA
  misc_feature 13..14: note = DNA
  misc_feature order(1..12,15..26): note = RNA
  modified_base 12: mod_base = OTHER; note = 2-Prime-O-Methoxyethyl modified nucleoside
  modified_base 13: mod_base = OTHER; note = DNA nucleotide carrying a 6-amino-5-nitro-3-yl-2(1H)-pyridone nucleobase
  modified_base order(6,8,10,16,19,21,23): mod_base = OTHER; note = 2-Prime-Fluoro modified nucleoside
  modified_base order(1..5,7,9,11,15,17..18,20,22,24..26): mod_base = OTHER; note = 2-Prime-O-Methyl modified nucleoside
  modified_base order(1^2,25^26): mod_base = OTHER; note = (1,3-dimethylimidazolidin-2-ylidene) Phosphoramidate linkage
  modified_base order(2..14,15..25): mod_base = OTHER; note = Phosphorothioate linkage
  modified_base 14^15: mod_base = OTHER; note = Methylphosphonate linkage
  misc_feature 1..26: note = RM109928
aacctctgaggantgggttcattttt

SEQ ID NO: 137 - DNA, 26 bp, synthetic construct
  source 1..26: mol_type = other DNA
  misc_feature 10..11: note = DNA
  misc_feature order(1..9,12..26): note = RNA
  modified_base 9: mod_base = OTHER; note = 2-Prime-O-Methoxyethyl modified nucleoside
  modified_base 10: mod_base = OTHER; note = DNA nucleotide carrying a 6-amino-5-nitro-3-yl-2(1H)-pyridone nucleobase
  modified_base order(3,5,7,13,16,18,20): mod_base = OTHER; note = 2-Prime-Fluoro modified nucleoside
  modified_base order(1..2,4,6,8,12,14..15,17,19,21..26): mod_base = OTHER; note = 2-Prime-O-Methyl modified nucleoside
  modified_base order(1^2,25^26): mod_base = OTHER; note = (1,3-dimethylimidazolidin-2-ylidene) Phosphoramidate linkage
  modified_base order(2..11,12..25): mod_base = OTHER; note = Phosphorothioate linkage
  modified_base 11^12: mod_base = OTHER; note = Methylphosphonate linkage
  misc_feature 1..26: note = RM109929
ctctgaggantgggttcatttttctt

SEQ ID NO: 138 - DNA, 26 bp, synthetic construct
  source 1..26: mol_type = other DNA
  misc_feature 16..17: note = DNA
  misc_feature order(1..15,18..26): note = RNA
  modified_base 15: mod_base = OTHER; note = 2-Prime-O-Methoxyethyl modified nucleoside
  modified_base 16: mod_base = OTHER; note = DNA nucleotide carrying a 6-amino-5-nitro-3-yl-2(1H)-pyridone nucleobase
  modified_base order(10,12,14,19,21,23,25): mod_base = OTHER; note = 2-Prime-Fluoro modified nucleoside
  modified_base order(1..9,11,13,18,20,22,24,26): mod_base = OTHER; note = 2-Prime-O-Methyl modified nucleoside
  modified_base order(1^2,25^26): mod_base = OTHER; note = (1,3-dimethylimidazolidin-2-ylidene) Phosphoramidate linkage
  modified_base order(2..17,18..25): mod_base = OTHER; note = Phosphorothioate linkage
  modified_base 17^18: mod_base = OTHER; note = Methylphosphonate linkage
  misc_feature 1..26: note = RM109930
tcaaacctctgaggantgggttcatt

SEQ ID NO: 139 - DNA, 26 bp, synthetic construct
  source 1..26: mol_type = other DNA
  misc_feature 13..14: note = DNA
  misc_feature order(1..12,15..26): note = RNA
  modified_base 12: mod_base = OTHER; note = 2-Prime-O-Methoxyethyl modified nucleoside
  modified_base 13: mod_base = OTHER; note = DNA nucleotide carrying a 6-amino-5-nitro-3-yl-2(1H)-pyridone nucleobase
  modified_base order(7,9,11,16,18,20,22): mod_base = OTHER; note = 2-Prime-Fluoro modified nucleoside
  modified_base order(1..6,8,10,15,17,19,21,23..26): mod_base = OTHER; note = 2-Prime-O-Methyl modified nucleoside
  modified_base order(1^2,25^26): mod_base = OTHER; note = (1,3-dimethylimidazolidin-2-ylidene) Phosphoramidate linkage
  modified_base order(2..14,15..25): mod_base = OTHER; note = Phosphorothioate linkage
  modified_base 14^15: mod_base = OTHER; note = Methylphosphonate linkage
  misc_feature 1..26: note = RM109931
aacctctgaggantgggttcattttt

SEQ ID NO: 140 - DNA, 26 bp, synthetic construct
  source 1..26: mol_type = other DNA
  misc_feature 10..11: note = DNA
  misc_feature order(1..9,12..26): note = RNA
  modified_base 9: mod_base = OTHER; note = 2-Prime-O-Methoxyethyl modified nucleoside
  modified_base 10: mod_base = OTHER; note = DNA nucleotide carrying a 6-amino-5-nitro-3-yl-2(1H)-pyridone nucleobase
  modified_base order(4,6,8,13,15,17,19): mod_base = OTHER; note = 2-Prime-Fluoro modified nucleoside
  modified_base order(1..3,5,7,12,14,16,18,20..26): mod_base = OTHER; note = 2-Prime-O-Methyl modified nucleoside
  modified_base order(1^2,25^26): mod_base = OTHER; note = (1,3-dimethylimidazolidin-2-ylidene) Phosphoramidate linkage
  modified_base order(2..11,12..25): mod_base = OTHER; note = Phosphorothioate linkage
  modified_base 11^12: mod_base = OTHER; note = Methylphosphonate linkage
  misc_feature 1..26: note = RM109932
ctctgaggantgggttcatttttctt

SEQ ID NO: 141 - DNA, 26 bp, synthetic construct
  source 1..26: mol_type = other DNA
  misc_feature 7..8: note = DNA
  misc_feature order(1..6,9..26): note = RNA
  modified_base 6: mod_base = OTHER; note = 2-Prime-O-Methoxyethyl modified nucleoside
  modified_base 7: mod_base = OTHER; note = DNA nucleotide carrying a 6-amino-5-nitro-3-yl-2(1H)-pyridone nucleobase
  modified_base order(1,3,5,10,12,14,16): mod_base = OTHER; note = 2-Prime-Fluoro modified nucleoside
  modified_base order(2,4,9,11,13,15,17..26): mod_base = OTHER; note = 2-Prime-O-Methyl modified nucleoside
  modified_base order(1^2,25^26): mod_base = OTHER; note = (1,3-dimethylimidazolidin-2-ylidene) Phosphoramidate linkage
  modified_base order(2..8,9..25): mod_base = OTHER; note = Phosphorothioate linkage
  modified_base 8^9: mod_base = OTHER; note = Methylphosphonate linkage
  misc_feature 1..26: note = RM109933
tgaggantgggttcatttttcttgtc

SEQ ID NO: 142 - DNA, 26 bp, synthetic construct
  source 1..26: mol_type = other DNA
  misc_feature 16..17: note = DNA
  misc_feature order(1..15,18..26): note = RNA
  modified_base 15: mod_base = OTHER; note = 2-Prime-O-Methoxyethyl modified nucleoside
  modified_base 16: mod_base = OTHER; note = DNA nucleotide carrying a 6-amino-5-nitro-3-yl-2(1H)-pyridone nucleobase
  modified_base order(10,12,14,19,22,24,26): mod_base = OTHER; note = 2-Prime-Fluoro modified nucleoside
  modified_base order(1..9,11,13,18,20..21,23,25): mod_base = OTHER; note = 2-Prime-O-Methyl modified nucleoside
  modified_base order(1^2,25^26): mod_base = OTHER; note = (1,3-dimethylimidazolidin-2-ylidene) Phosphoramidate linkage
  modified_base order(2..17,18..25): mod_base = OTHER; note = Phosphorothioate linkage
  modified_base 17^18: mod_base = OTHER; note = Methylphosphonate linkage
  misc_feature 1..26: note = RM109934
tcaaacctctgaggantgggttcatt

SEQ ID NO: 143 - DNA, 26 bp, synthetic construct
  source 1..26: mol_type = other DNA
  misc_feature 13..14: note = DNA
  misc_feature order(1..12,15..26): note = RNA
  modified_base 12: mod_base = OTHER; note = 2-Prime-O-Methoxyethyl modified nucleoside
  modified_base 13: mod_base = OTHER; note = DNA nucleotide carrying a 6-amino-5-nitro-3-yl-2(1H)-pyridone nucleobase
  modified_base order(7,9,11,16,19,21,23): mod_base = OTHER; note = 2-Prime-Fluoro modified nucleoside
  modified_base order(1..6,8,10,15,17..18,20,22,24..26): mod_base = OTHER; note = 2-Prime-O-Methyl modified nucleoside
  modified_base order(1^2,25^26): mod_base = OTHER; note = (1,3-dimethylimidazolidin-2-ylidene) Phosphoramidate linkage
  modified_base order(2..14,15..25): mod_base = OTHER; note = Phosphorothioate linkage
  modified_base 14^15: mod_base = OTHER; note = Methylphosphonate linkage
  misc_feature 1..26: note = RM109935
aacctctgaggantgggttcattttt

SEQ ID NO: 144 - DNA, 26 bp, synthetic construct
  source 1..26: mol_type = other DNA
  misc_feature 10..11: note = DNA
  misc_feature order(1..9,12..26): note = RNA
  modified_base 9: mod_base = OTHER; note = 2-Prime-O-Methoxyethyl modified nucleoside
  modified_base 10: mod_base = OTHER; note = DNA nucleotide carrying a 6-amino-5-nitro-3-yl-2(1H)-pyridone nucleobase
  modified_base order(4,6,8,13,16,18,20): mod_base = OTHER; note = 2-Prime-Fluoro modified nucleoside
  modified_base order(1..3,5,7,12,14..15,17,19,21..26): mod_base = OTHER; note = 2-Prime-O-Methyl modified nucleoside
  modified_base order(1^2,25^26): mod_base = OTHER; note = (1,3-dimethylimidazolidin-2-ylidene) Phosphoramidate linkage
  modified_base order(2..11,12..25): mod_base = OTHER; note = Phosphorothioate linkage
  modified_base 11^12: mod_base = OTHER; note = Methylphosphonate linkage
  misc_feature 1..26: note = RM109936
ctctgaggantgggttcatttttctt

SEQ ID NO: 145 - DNA, 26 bp, synthetic construct
  source 1..26: mol_type = other DNA
  misc_feature 7..8: note = DNA
  misc_feature order(1..6,9..26): note = RNA
  modified_base 6: mod_base = OTHER; note = 2-Prime-O-Methoxyethyl modified nucleoside
  modified_base 7: mod_base = OTHER; note = DNA nucleotide carrying a 6-amino-5-nitro-3-yl-2(1H)-pyridone nucleobase
  modified_base order(1,3,5,10,13,15,17): mod_base = OTHER; note = 2-Prime-Fluoro modified nucleoside
  modified_base order(2,4,9,11..12,14,16,18..26): mod_base = OTHER; note = 2-Prime-O-Methyl modified nucleoside
  modified_base order(1^2,25^26): mod_base = OTHER; note = (1,3-dimethylimidazolidin-2-ylidene) Phosphoramidate linkage
  modified_base order(2..8,9..25): mod_base = OTHER; note = Phosphorothioate linkage
  modified_base 8^9: mod_base = OTHER; note = Methylphosphonate linkage
  misc_feature 1..26: note = RM109937
tgaggantgggttcatttttcttgtc

SEQ ID NO: 146 - DNA, 23 bp, synthetic construct
  source 1..23: mol_type = other DNA
  misc_feature 15..16: note = DNA
  misc_feature order(1..14,17..23): note = RNA
  modified_base 14: mod_base = OTHER; note = 2-Prime-O-Methoxyethyl modified nucleoside
  modified_base 15: mod_base = OTHER; note = DNA nucleotide carrying a 6-amino-5-nitro-3-yl-2(1H)-pyridone nucleobase
  modified_base order(9,11,13,18,20,22): mod_base = OTHER; note = 2-Prime-Fluoro modified nucleoside
  modified_base order(1..8,10,12,17,19,21,23): mod_base = OTHER; note = 2-Prime-O-Methyl modified nucleoside
  modified_base order(1^2,22^23): mod_base = OTHER; note = (1,3-dimethylimidazolidin-2-ylidene) Phosphoramidate linkage
  modified_base order(2..16,17..22): mod_base = OTHER; note = Phosphorothioate linkage
  modified_base 16^17: mod_base = OTHER; note = Methylphosphonate linkage
  misc_feature 1..23: note = RM109938
caaacctctgaggantgggttca

SEQ ID NO: 147 - DNA, 23 bp, synthetic construct
  source 1..23: mol_type = other DNA
  misc_feature 12..13: note = DNA
  misc_feature order(1..11,14..23): note = RNA
  modified_base 11: mod_base = OTHER; note = 2-Prime-O-Methoxyethyl modified nucleoside
  modified_base 12: mod_base = OTHER; note = DNA nucleotide carrying a 6-amino-5-nitro-3-yl-2(1H)-pyridone nucleobase
  modified_base order(6,8,10,15,17,19): mod_base = OTHER; note = 2-Prime-Fluoro modified nucleoside
  modified_base order(1..5,7,9,14,16,18,20..23): mod_base = OTHER; note = 2-Prime-O-Methyl modified nucleoside
  modified_base order(1^2,22^23): mod_base = OTHER; note = (1,3-dimethylimidazolidin-2-ylidene) Phosphoramidate linkage
  modified_base order(2..13,14..22): mod_base = OTHER; note = Phosphorothioate linkage
  modified_base 13^14: mod_base = OTHER; note = Methylphosphonate linkage
  misc_feature 1..23: note = RM109939
acctctgaggantgggttcattt

SEQ ID NO: 148 - DNA, 23 bp, synthetic construct
  source 1..23: mol_type = other DNA
  misc_feature 9..10: note = DNA
  misc_feature order(1..8,11..23): note = RNA
  modified_base 8: mod_base = OTHER; note = 2-Prime-O-Methoxyethyl modified nucleoside
  modified_base 9: mod_base = OTHER; note = DNA nucleotide carrying a 6-amino-5-nitro-3-yl-2(1H)-pyridone nucleobase
  modified_base order(3,5,7,12,14,16): mod_base = OTHER; note = 2-Prime-Fluoro modified nucleoside
  modified_base order(1..2,4,6,11,13,15,17..23): mod_base = OTHER; note = 2-Prime-O-Methyl modified nucleoside
  modified_base order(1^2,22^23): mod_base = OTHER; note = (1,3-dimethylimidazolidin-2-ylidene) Phosphoramidate linkage
  modified_base order(2..10,11..22): mod_base = OTHER; note = Phosphorothioate linkage
  modified_base 10^11: mod_base = OTHER; note = Methylphosphonate linkage
  misc_feature 1..23: note = RM109940
tctgaggantgggttcatttttc

SEQ ID NO: 149 - DNA, 32 bp, synthetic construct; identical to SEQ ID NO: 128
  source 1..32: mol_type = other DNA
  misc_feature 25..26: note = DNA
  misc_feature order(1..24,27..32): note = RNA
  modified_base 24: mod_base = OTHER; note = 2-Prime-O-Methoxyethyl modified nucleoside
  modified_base 25: mod_base = OTHER; note = DNA nucleotide carrying a 6-amino-5-nitro-3-yl-2(1H)-pyridone nucleobase
  modified_base order(19,21,23,28,30,32): mod_base = OTHER; note = 2-Prime-Fluoro modified nucleoside
  modified_base order(1..18,20,22,27,29,31): mod_base = OTHER; note = 2-Prime-O-Methyl modified nucleoside
  modified_base order(1^2,31^32): mod_base = OTHER; note = (1,3-dimethylimidazolidin-2-ylidene) Phosphoramidate linkage
  modified_base order(2..26,27..31): mod_base = OTHER; note = Phosphorothioate linkage
  modified_base 26^27: mod_base = OTHER; note = Methylphosphonate linkage
  misc_feature 1..32: note = RM109941

SEQ ID NO: 150 - DNA, 32 bp, synthetic construct; identical to SEQ ID NO: 129
  source 1..32: mol_type = other DNA
  misc_feature 22..23: note = DNA
  misc_feature order(1..21,24..32): note = RNA
  modified_base 21: mod_base = OTHER; note = 2-Prime-O-Methoxyethyl modified nucleoside
  modified_base 22: mod_base = OTHER; note = DNA nucleotide carrying a 6-amino-5-nitro-3-yl-2(1H)-pyridone nucleobase
  modified_base order(16,18,20,25,27,29): mod_base = OTHER; note = 2-Prime-Fluoro modified nucleoside
  modified_base order(1..15,17,19,24,26,28,30..32): mod_base = OTHER; note = 2-Prime-O-Methyl modified nucleoside
  modified_base order(1^2,31^32): mod_base = OTHER; note = (1,3-dimethylimidazolidin-2-ylidene) Phosphoramidate linkage
  modified_base order(2..23,24..31): mod_base = OTHER; note = Phosphorothioate linkage
  modified_base 23^24: mod_base = OTHER; note = Methylphosphonate linkage
  misc_feature 1..32: note = RM109942

SEQ ID NO: 151 - DNA, 32 bp, synthetic construct; identical to SEQ ID NO: 19
  source 1..32: mol_type = other DNA
  misc_feature 19..20: note = DNA
  misc_feature order(1..18,21..32): note = RNA
  modified_base 18: mod_base = OTHER; note = 2-Prime-O-Methoxyethyl modified nucleoside
  modified_base 19: mod_base = OTHER; note = DNA nucleotide carrying a 6-amino-5-nitro-3-yl-2(1H)-pyridone nucleobase
  modified_base order(13,15,17,22,24,26): mod_base = OTHER; note = 2-Prime-Fluoro modified nucleoside
  modified_base order(1..12,14,16,21,23,25,27..32): mod_base = OTHER; note = 2-Prime-O-Methyl modified nucleoside
  modified_base order(1^2,31^32): mod_base = OTHER; note = (1,3-dimethylimidazolidin-2-ylidene) Phosphoramidate linkage
  modified_base order(2..20,21..31): mod_base = OTHER; note = Phosphorothioate linkage
  modified_base 20^21: mod_base = OTHER; note = Methylphosphonate linkage
  misc_feature 1..32: note = RM109943

SEQ ID NO: 152 - DNA, 32 bp, synthetic construct; identical to SEQ ID NO: 131
  source 1..32: mol_type = other DNA
  misc_feature 16..17: note = DNA
  misc_feature order(1..15,18..32): note = RNA
  modified_base 15: mod_base = OTHER; note = 2-Prime-O-Methoxyethyl modified nucleoside
  modified_base 16: mod_base = OTHER; note = DNA nucleotide carrying a 6-amino-5-nitro-3-yl-2(1H)-pyridone nucleobase
  modified_base order(10,12,14,19,21,23): mod_base = OTHER; note = 2-Prime-Fluoro modified nucleoside
  modified_base order(1..9,11,13,18,20,22,24..32): mod_base = OTHER; note = 2-Prime-O-Methyl modified nucleoside
  modified_base order(1^2,31^32): mod_base = OTHER; note = (1,3-dimethylimidazolidin-2-ylidene) Phosphoramidate linkage
  modified_base order(2..17,18..31): mod_base = OTHER; note = Phosphorothioate linkage
  modified_base 17^18: mod_base = OTHER; note = Methylphosphonate linkage
  misc_feature 1..32: note = RM109944

SEQ ID NO: 153 - DNA, 32 bp, synthetic construct; identical to SEQ ID NO: 132
  source 1..32: mol_type = other DNA
  misc_feature 13..14: note = DNA
  misc_feature order(1..12,15..32): note = RNA
  modified_base 12: mod_base = OTHER; note = 2-Prime-O-Methoxyethyl modified nucleoside
  modified_base 13: mod_base = OTHER; note = DNA nucleotide carrying a 6-amino-5-nitro-3-yl-2(1H)-pyridone nucleobase
  modified_base order(7,9,11,16,18,20): mod_base = OTHER; note = 2-Prime-Fluoro modified nucleoside
  modified_base order(1..6,8,10,15,17,19,21..32): mod_base = OTHER; note = 2-Prime-O-Methyl modified nucleoside
  modified_base order(1^2,31^32): mod_base = OTHER; note = (1,3-dimethylimidazolidin-2-ylidene) Phosphoramidate linkage
  modified_base order(2..14,15..31): mod_base = OTHER; note = Phosphorothioate linkage
  modified_base 14^15: mod_base = OTHER; note = Methylphosphonate linkage
  misc_feature 1..32: note = RM109945

SEQ ID NO: 154 - DNA, 32 bp, synthetic construct; identical to SEQ ID NO: 133
  source 1..32: mol_type = other DNA
  misc_feature 10..11: note = DNA
  misc_feature order(1..9,12..32): note = RNA
  modified_base 9: mod_base = OTHER; note = 2-Prime-O-Methoxyethyl modified nucleoside
  modified_base 10: mod_base = OTHER; note = DNA nucleotide carrying a 6-amino-5-nitro-3-yl-2(1H)-pyridone nucleobase
  modified_base order(4,6,8,13,15,17): mod_base = OTHER; note = 2-Prime-Fluoro modified nucleoside
  modified_base order(1..3,5,7,12,14,16,18..32): mod_base = OTHER; note = 2-Prime-O-Methyl modified nucleoside
  modified_base order(1^2,31^32): mod_base = OTHER; note = (1,3-dimethylimidazolidin-2-ylidene) Phosphoramidate linkage
  modified_base order(2..11,12..31): mod_base = OTHER; note = Phosphorothioate linkage
  modified_base 11^12: mod_base = OTHER; note = Methylphosphonate linkage
  misc_feature 1..32: note = RM109946

SEQ ID NO: 155 - DNA, 32 bp, synthetic construct; identical to SEQ ID NO: 134
  source 1..32: mol_type = other DNA
  misc_feature 7..8: note = DNA
  misc_feature order(1..6,9..32): note = RNA
  modified_base 6: mod_base = OTHER; note = 2-Prime-O-Methoxyethyl modified nucleoside
  modified_base 7: mod_base = OTHER; note = DNA nucleotide carrying a 6-amino-5-nitro-3-yl-2(1H)-pyridone nucleobase
  modified_base order(1,3,5,10,12,14): mod_base = OTHER; note = 2-Prime-Fluoro modified nucleoside
  modified_base order(2,4,9,11,13,15..32): mod_base = OTHER; note = 2-Prime-O-Methyl modified nucleoside
  modified_base order(1^2,31^32): mod_base = OTHER; note = (1,3-dimethylimidazolidin-2-ylidene) Phosphoramidate linkage
  modified_base order(2..8,9..31): mod_base = OTHER; note = Phosphorothioate linkage
  modified_base 8^9: mod_base = OTHER; note = Methylphosphonate linkage
  misc_feature 1..32: note = RM109947

SEQ ID NO: 156 - DNA, 26 bp, synthetic construct
  source 1..26: mol_type = other DNA
  misc_feature 16..17: note = DNA
  misc_feature order(1..15,18..26): note = RNA
  modified_base 15: mod_base = OTHER; note = 2-Prime-O-Methoxyethyl modified nucleoside
  modified_base 16: mod_base = OTHER; note = DNA nucleotide carrying a 6-amino-5-nitro-3-yl-2(1H)-pyridone nucleobase
  modified_base order(9,11,13,19,21,23,25): mod_base = OTHER; note = 2-Prime-Fluoro modified nucleoside
  modified_base order(1..8,10,12,14,18,20,22,24,26): mod_base = OTHER; note = 2-Prime-O-Methyl modified nucleoside
  modified_base order(1^2,25^26): mod_base = OTHER; note = (1,3-dimethylimidazolidin-2-ylidene) Phosphoramidate linkage
  modified_base order(2..17,18..25): mod_base = OTHER; note = Phosphorothioate linkage
  modified_base 17^18: mod_base = OTHER; note = Methylphosphonate linkage
  misc_feature 1..26: note = RM109948
tcaaacctctgaggantgggttcatt

SEQ ID NO: 157 - DNA, 26 bp, synthetic construct
  source 1..26: mol_type = other DNA
  misc_feature 13..14: note = DNA
  misc_feature order(1..12,15..26): note = RNA
  modified_base 12: mod_base = OTHER; note = 2-Prime-O-Methoxyethyl modified nucleoside
  modified_base 13: mod_base = OTHER; note = DNA nucleotide carrying a 6-amino-5-nitro-3-yl-2(1H)-pyridone nucleobase
  modified_base order(6,8,10,16,18,20,22): mod_base = OTHER; note = 2-Prime-Fluoro modified nucleoside
  modified_base order(1..5,7,9,11,15,17,19,21,23..26): mod_base = OTHER; note = 2-Prime-O-Methyl modified nucleoside
  modified_base order(1^2,25^26): mod_base = OTHER; note = (1,3-dimethylimidazolidin-2-ylidene) Phosphoramidate linkage
  modified_base order(2..14,15..25): mod_base = OTHER; note = Phosphorothioate linkage
  modified_base 14^15: mod_base = OTHER; note = Methylphosphonate linkage
  misc_feature 1..26: note = RM109949
aacctctgaggantgggttcattttt

SEQ ID NO: 158 - DNA, 26 bp, synthetic construct
  source 1..26: mol_type = other DNA
  misc_feature 10..11: note = DNA
  misc_feature order(1..9,12..26): note = RNA
  modified_base 9: mod_base = OTHER; note = 2-Prime-O-Methoxyethyl modified nucleoside
  modified_base 10: mod_base = OTHER; note = DNA nucleotide carrying a 6-amino-5-nitro-3-yl-2(1H)-pyridone nucleobase
  modified_base order(3,5,7,13,15,17,19): mod_base = OTHER; note = 2-Prime-Fluoro modified nucleoside
  modified_base order(1..2,4,6,8,12,14,16,18,20..26): mod_base = OTHER; note = 2-Prime-O-Methyl modified nucleoside
  modified_base order(1^2,25^26): mod_base = OTHER; note = (1,3-dimethylimidazolidin-2-ylidene) Phosphoramidate linkage
  modified_base order(2..11,12..25): mod_base = OTHER; note = Phosphorothioate linkage
  modified_base 11^12: mod_base = OTHER; note = Methylphosphonate linkage
  misc_feature 1..26: note = RM109950
ctctgaggantgggttcatttttctt

SEQ ID NO: 159 - DNA, 32 bp, synthetic construct; identical to SEQ ID NO: 127
  source 1..32: mol_type = other DNA
  misc_feature 28..29: note = DNA
  misc_feature order(1..27,30..32): note = RNA
  modified_base 27: mod_base = OTHER; note = 2-Prime-O-Methoxyethyl modified nucleoside
  modified_base 28: mod_base = OTHER; note = DNA nucleotide carrying a 6-amino-5-nitro-3-yl-2(1H)-pyridone nucleobase
  modified_base order(10..12,17..18,22..23,26,31): mod_base = OTHER; note = 2-Prime-Fluoro modified nucleoside
  modified_base order(1..9,13..16,19..21,24..25,30,32): mod_base = OTHER; note = 2-Prime-O-Methyl modified nucleoside
  modified_base order(1^2,31^32): mod_base = OTHER; note = (1,3-dimethylimidazolidin-2-ylidene) Phosphoramidate linkage
  modified_base order(2..29,30^31): mod_base = OTHER; note = Phosphorothioate linkage
  modified_base 29^30: mod_base = OTHER; note = Methylphosphonate linkage
  misc_feature 1..32: note = RM109951

SEQ ID NO: 160 - DNA, 32 bp, synthetic construct; identical to SEQ ID NO: 128
  source 1..32: mol_type = other DNA
  misc_feature 25..26: note = DNA
  misc_feature order(1..24,27..32): note = RNA
  modified_base 24: mod_base = OTHER; note = 2-Prime-O-Methoxyethyl modified nucleoside
  modified_base 25: mod_base = OTHER; note = DNA nucleotide carrying a 6-amino-5-nitro-3-yl-2(1H)-pyridone nucleobase
  modified_base order(7..9,14..15,19..20,23,28): mod_base = OTHER; note = 2-Prime-Fluoro modified nucleoside
  modified_base order(1..6,10..13,16..18,21..22,27,29..32): mod_base = OTHER; note = 2-Prime-O-Methyl modified nucleoside
  modified_base order(1^2,31^32): mod_base = OTHER; note = (1,3-dimethylimidazolidin-2-ylidene) Phosphoramidate linkage
  modified_base order(2..26,27..31): mod_base = OTHER; note = Phosphorothioate linkage
  modified_base 26^27: mod_base = OTHER; note = Methylphosphonate linkage
  misc_feature 1..32: note = RM109952

SEQ ID NO: 161 - DNA, 32 bp, synthetic construct; identical to SEQ ID NO: 129
  source 1..32: mol_type = other DNA
  misc_feature 22..23: note = DNA
  misc_feature order(1..21,24..32): note = RNA
  modified_base 21: mod_base = OTHER; note = 2-Prime-O-Methoxyethyl modified nucleoside
  modified_base 22: mod_base = OTHER; note = DNA nucleotide carrying a 6-amino-5-nitro-3-yl-2(1H)-pyridone nucleobase
  modified_base order(4..6,11..12,16..17,20,25): mod_base = OTHER; note = 2-Prime-Fluoro modified nucleoside
  modified_base order(1..3,7..10,13..15,18..19,24,26..32): mod_base = OTHER; note = 2-Prime-O-Methyl modified nucleoside
  modified_base order(1^2,31^32): mod_base = OTHER; note = (1,3-dimethylimidazolidin-2-ylidene) Phosphoramidate linkage
  modified_base order(2..23,24..31): mod_base = OTHER; note = Phosphorothioate linkage
  modified_base 23^24: mod_base = OTHER; note = Methylphosphonate linkage
  misc_feature 1..32: note = RM109953

SEQ ID NO: 162 - DNA, 32 bp, synthetic construct; identical to SEQ ID NO: 19
  source 1..32: mol_type = other DNA
  misc_feature 19..20: note = DNA
  misc_feature order(1..18,21..32): note = RNA
  modified_base 18: mod_base = OTHER; note = 2-Prime-O-Methoxyethyl modified nucleoside
  modified_base 19: mod_base = OTHER; note = DNA nucleotide carrying a 6-amino-5-nitro-3-yl-2(1H)-pyridone nucleobase
  modified_base order(1..3,8..9,13..14,17,22): mod_base = OTHER; note = 2-Prime-Fluoro modified nucleoside
  modified_base order(4..7,10..12,15..16,21,23..32): mod_base = OTHER; note = 2-Prime-O-Methyl modified nucleoside
  modified_base order(1^2,31^32): mod_base = OTHER; note = (1,3-dimethylimidazolidin-2-ylidene) Phosphoramidate linkage
  modified_base order(2..20,21..31): mod_base = OTHER; note = Phosphorothioate linkage
  modified_base 20^21: mod_base = OTHER; note = Methylphosphonate linkage
  misc_feature 1..32: note = RM109954

SEQ ID NO: 163 - DNA, 26 bp, synthetic construct
  source 1..26: mol_type = other DNA
  misc_feature 13..14: note = DNA
  misc_feature order(1..12,15..26): note = RNA
  modified_base 12: mod_base = OTHER; note = 2-Prime-O-Methoxyethyl modified nucleoside
  modified_base 13: mod_base = OTHER; note = DNA nucleotide carrying a 6-amino-5-nitro-3-yl-2(1H)-pyridone nucleobase
  modified_base order(2,4,6,16,22,24,26): mod_base = OTHER; note = 2-Prime-Fluoro modified nucleoside
  modified_base order(1,3,5,7..11,15,17..21,23,25): mod_base = OTHER; note = 2-Prime-O-Methyl modified nucleoside
  modified_base order(1^2,25^26): mod_base = OTHER; note = (1,3-dimethylimidazolidin-2-ylidene) Phosphoramidate linkage
  modified_base order(2..14,15..25): mod_base = OTHER; note = Phosphorothioate linkage
  modified_base 14^15: mod_base = OTHER; note = Methylphosphonate linkage
  misc_feature 1..26: note = RM109955
aacctctgaggantgggttcattttt

SEQ ID NO: 164 - DNA, 29 bp, synthetic construct
  source 1..29: mol_type = other DNA
  misc_feature 18..19: note = DNA
  misc_feature order(1..17,20..29): note = RNA
  modified_base 17: mod_base = OTHER; note = 2-Prime-O-Methoxyethyl modified nucleoside
  modified_base 18: mod_base = OTHER; note = DNA nucleotide carrying a 6-amino-5-nitro-3-yl-2(1H)-pyridone nucleobase
  modified_base order(8,11,14..15,21,26..28): mod_base = OTHER; note = 2-Prime-Fluoro modified nucleoside
  modified_base order(1..7,9..10,12..13,16,20,22..25,29): mod_base = OTHER; note = 2-Prime-O-Methyl modified nucleoside
  modified_base order(1^2,28^29): mod_base = OTHER; note = (1,3-dimethylimidazolidin-2-ylidene) Phosphoramidate linkage
  modified_base order(2..19,20..28): mod_base = OTHER; note = Phosphorothioate linkage
  modified_base 19^20: mod_base = OTHER; note = Methylphosphonate linkage
  misc_feature 1..29: note = RM109956
ggtcaaacctctgaggantgggttcattt

SEQ ID NO: 165 - DNA, 29 bp, synthetic construct
  source 1..29: mol_type = other DNA
  misc_feature 15..16: note = DNA
  misc_feature order(1..14,17..29): note = RNA
  modified_base 14: mod_base = OTHER; note = 2-Prime-O-Methoxyethyl modified nucleoside
  modified_base 15: mod_base = OTHER; note = DNA nucleotide carrying a 6-amino-5-nitro-3-yl-2(1H)-pyridone nucleobase
  modified_base order(5,8,11..12,18,23..25): mod_base = OTHER; note = 2-Prime-Fluoro modified nucleoside
  modified_base order(1..4,6..7,9..10,13,17,19..22,26..29): mod_base = OTHER; note = 2-Prime-O-Methyl modified nucleoside
  modified_base order(1^2,28^29): mod_base = OTHER; note = (1,3-dimethylimidazolidin-2-ylidene) Phosphoramidate linkage
  modified_base order(2..16,17..28): mod_base = OTHER; note = Phosphorothioate linkage
  modified_base 16^17: mod_base = OTHER; note = Methylphosphonate linkage
  misc_feature 1..29: note = RM109957
caaacctctgaggantgggttcatttttc

SEQ ID NO: 166 - DNA, 29 bp, synthetic construct
  source 1..29: mol_type = other DNA
  misc_feature 12..13: note = DNA
  misc_feature order(1..11,14..29): note = RNA
  modified_base 11: mod_base = OTHER; note = 2-Prime-O-Methoxyethyl modified nucleoside
  modified_base 12: mod_base = OTHER; note = DNA nucleotide carrying a 6-amino-5-nitro-3-yl-2(1H)-pyridone nucleobase
  modified_base order(2,5,8..9,15,20..22): mod_base = OTHER; note = 2-Prime-Fluoro modified nucleoside
  modified_base order(1,3..4,6..7,10,14,16..19,23..29): mod_base = OTHER; note = 2-Prime-O-Methyl modified nucleoside
  modified_base order(1^2,28^29): mod_base = OTHER; note = (1,3-dimethylimidazolidin-2-ylidene) Phosphoramidate linkage
  modified_base order(2..13,14..28): mod_base = OTHER; note = Phosphorothioate linkage
  modified_base 13^14: mod_base = OTHER; note = Methylphosphonate linkage
  misc_feature 1..29: note = RM109958
acctctgaggantgggttcatttttcttg

SEQ ID NO: 167 - DNA, 26 bp, synthetic construct
  source 1..26: mol_type = other DNA
  misc_feature 19..20: note = DNA
  misc_feature order(1..18,21..26): note = RNA
  modified_base 18: mod_base = OTHER; note = 2-Prime-O-Methoxyethyl modified nucleoside
  modified_base 19: mod_base = OTHER; note = DNA nucleotide carrying a 6-amino-5-nitro-3-yl-2(1H)-pyridone nucleobase
  modified_base order(5,9,11,13,16,22,25): mod_base = OTHER; note = 2-Prime-Fluoro modified nucleoside
  modified_base order(1..4,6..8,10,12,14..15,17,21,23..24,26): mod_base = OTHER; note = 2-Prime-O-Methyl modified nucleoside
  modified_base order(1^2,25^26): mod_base = OTHER; note = (1,3-dimethylimidazolidin-2-ylidene) Phosphoramidate linkage
  modified_base order(2..20,21..25): mod_base = OTHER; note = Phosphorothioate linkage
  modified_base 20^21: mod_base = OTHER; note = Methylphosphonate linkage
  misc_feature 1..26: note = RM109959
cggtcaaacctctgaggantgggttc

SEQ ID NO: 168 - DNA, 26 bp, synthetic construct
  source 1..26: mol_type = other DNA
  misc_feature 16..17: note = DNA
  misc_feature order(1..15,18..26): note = RNA
  modified_base 15: mod_base = OTHER; note = 2-Prime-O-Methoxyethyl modified nucleoside
  modified_base 16: mod_base = OTHER; note = DNA nucleotide carrying a 6-amino-5-nitro-3-yl-2(1H)-pyridone nucleobase
  modified_base order(2,6,8,10,13,19,22): mod_base = OTHER; note = 2-Prime-Fluoro modified nucleoside
  modified_base order(1,3..5,7,9,11..12,14,18,20..21,23..26): mod_base = OTHER; note = 2-Prime-O-Methyl modified nucleoside
  modified_base order(1^2,25^26): mod_base = OTHER; note = (1,3-dimethylimidazolidin-2-ylidene) Phosphoramidate linkage
  modified_base order(2..17,18..25): mod_base = OTHER; note = Phosphorothioate linkage
  modified_base 17^18: mod_base = OTHER; note = Methylphosphonate linkage
  misc_feature 1..26: note = RM109960
tcaaacctctgaggantgggttcatt

SEQ ID NO: 169 - DNA, 26 bp, synthetic construct
  source 1..26: mol_type = other DNA
  misc_feature 10..11: note = DNA
  misc_feature order(1..9,12..26): note = RNA
  modified_base 9: mod_base = OTHER; note = 2-Prime-O-Methoxyethyl modified nucleoside
  modified_base 10: mod_base = OTHER; note = DNA nucleotide carrying a 6-amino-5-nitro-3-yl-2(1H)-pyridone nucleobase
  modified_base order(6,13,15,18,20,22,26): mod_base = OTHER; note = 2-Prime-Fluoro modified nucleoside
  modified_base order(1..5,7..8,12,14,16..17,19,21,23..25): mod_base = OTHER; note = 2-Prime-O-Methyl modified nucleoside
  modified_base order(1^2,25^26): mod_base = OTHER; note = (1,3-dimethylimidazolidin-2-ylidene) Phosphoramidate linkage
  modified_base order(2..11,12..25): mod_base = OTHER; note = Phosphorothioate linkage
  modified_base 11^12: mod_base = OTHER; note = Methylphosphonate linkage
  misc_feature 1..26: note = RM109961
ctctgaggantgggttcatttttctt

SEQ ID NO: 170 - DNA, 26 bp, synthetic construct
  source 1..26: mol_type = other DNA
  misc_feature 7..8: note = DNA
  misc_feature order(1..6,9..26): note = RNA
  modified_base 6: mod_base = OTHER; note = 2-Prime-O-Methoxyethyl modified nucleoside
  modified_base 7: mod_base = OTHER; note = DNA nucleotide carrying a 6-amino-5-nitro-3-yl-2(1H)-pyridone nucleobase
  modified_base order(3,10,12,15,17,19,23): mod_base = OTHER; note = 2-Prime-Fluoro modified nucleoside
  modified_base order(1..2,4..5,9,11,13..14,16,18,20..22,24..26): mod_base = OTHER; note = 2-Prime-O-Methyl modified nucleoside
  modified_base order(1^2,25^26): mod_base = OTHER; note = (1,3-dimethylimidazolidin-2-ylidene) Phosphoramidate linkage
  modified_base order(2..8,9..25): mod_base = OTHER; note = Phosphorothioate linkage
  modified_base 8^9: mod_base = OTHER; note = Methylphosphonate linkage
  misc_feature 1..26: note = RM109962
tgaggantgggttcatttttcttgtc

SEQ ID NO: 171 - DNA, 26 bp, synthetic construct
  source 1..26: mol_type = other DNA
  misc_feature 19..20: note = DNA
  misc_feature order(1..18,21..26): note = RNA
  modified_base 18: mod_base = OTHER; note = 2-Prime-O-Methoxyethyl modified nucleoside
  modified_base 19: mod_base = OTHER; note = DNA nucleotide carrying a 6-amino-5-nitro-3-yl-2(1H)-pyridone nucleobase
  modified_base order(11,13,16,22,25): mod_base = OTHER; note = 2-Prime-Fluoro modified nucleoside
  modified_base order(1..10,12,14..15,17,21,23..24,26): mod_base = OTHER; note = 2-Prime-O-Methyl modified nucleoside
  modified_base order(1^2,25^26): mod_base = OTHER; note = (1,3-dimethylimidazolidin-2-ylidene) Phosphoramidate linkage
  modified_base order(2..20,21..25): mod_base = OTHER; note = Phosphorothioate linkage
  modified_base 20^21: mod_base = OTHER; note = Methylphosphonate linkage
  misc_feature 1..26: note = RM109963
cggtcaaacctctgaggantgggttc

SEQ ID NO: 172 - DNA, 26 bp, synthetic construct
  source 1..26: mol_type = other DNA
  misc_feature 16..17: note = DNA
  misc_feature order(1..15,18..26): note = RNA
  modified_base 15: mod_base = OTHER; note = 2-Prime-O-Methoxyethyl modified nucleoside
  modified_base 16: mod_base = OTHER; note = DNA nucleotide carrying a 6-amino-5-nitro-3-yl-2(1H)-pyridone nucleobase
  modified_base order(8,10,13,19,22): mod_base = OTHER; note = 2-Prime-Fluoro modified nucleoside
  modified_base order(1..7,9,11..12,14,18,20..21,23..26): mod_base = OTHER; note = 2-Prime-O-Methyl modified nucleoside
  modified_base order(1^2,25^26): mod_base = OTHER; note = (1,3-dimethylimidazolidin-2-ylidene) Phosphoramidate linkage
  modified_base order(2..17,18..25): mod_base = OTHER; note = Phosphorothioate linkage
  modified_base 17^18: mod_base = OTHER; note = Methylphosphonate linkage
  misc_feature 1..26: note = RM109964
tcaaacctctgaggantgggttcatt

SEQ ID NO: 173 - DNA, 26 bp, synthetic construct
  source 1..26: mol_type = other DNA
  misc_feature 13..14: note = DNA
  misc_feature order(1..12,15..26): note = RNA
  modified_base 12: mod_base = OTHER; note = 2-Prime-O-Methoxyethyl modified nucleoside
  modified_base 13: mod_base = OTHER; note = DNA nucleotide carrying a 6-amino-5-nitro-3-yl-2(1H)-pyridone nucleobase
  modified_base order(5,7,10,16,19): mod_base = OTHER; note = 2-Prime-Fluoro modified nucleoside
  modified_base order(1..4,6,8..9,11,15,17..18,20..26): mod_base = OTHER; note = 2-Prime-O-Methyl modified nucleoside
  modified_base order(1^2,25^26): mod_base = OTHER; note = (1,3-dimethylimidazolidin-2-ylidene) Phosphoramidate linkage
  modified_base order(2..14,15..25): mod_base = OTHER; note = Phosphorothioate linkage
  modified_base 14^15: mod_base = OTHER; note = Methylphosphonate linkage
  misc_feature 1..26: note = RM109965
aacctctgaggantgggttcattttt

SEQ ID NO: 174 - DNA, 26 bp, synthetic construct
  source 1..26: mol_type = other DNA
  misc_feature 10..11: note = DNA
  misc_feature order(1..9,12..26): note = RNA
  modified_base 9: mod_base = OTHER; note = 2-Prime-O-Methoxyethyl modified nucleoside
  modified_base 10: mod_base = OTHER; note = DNA nucleotide carrying a 6-amino-5-nitro-3-yl-2(1H)-pyridone nucleobase
  modified_base order(2,4,7,13,16): mod_base = OTHER; note = 2-Prime-Fluoro modified nucleoside
  modified_base order(1,3,5..6,8,12,14..15,17..26): mod_base = OTHER; note = 2-Prime-O-Methyl modified nucleoside
  modified_base order(1^2,25^26): mod_base = OTHER; note = (1,3-dimethylimidazolidin-2-ylidene) Phosphoramidate linkage
  modified_base order(2..11,12..25): mod_base = OTHER; note = Phosphorothioate linkage
  modified_base 11^12: mod_base = OTHER; note = Methylphosphonate linkage
  misc_feature 1..26: note = RM109966
ctctgaggantgggttcatttttctt

SEQ ID NO: 175 - DNA, 29 bp, synthetic construct
  source 1..29: mol_type = other DNA
  misc_feature 21..22: note = DNA
  misc_feature order(1..20,23..29): note = RNA
  modified_base 20: mod_base = OTHER; note = 2-Prime-O-Methoxyethyl modified nucleoside
  modified_base 21: mod_base = OTHER; note = DNA nucleotide carrying a 6-amino-5-nitro-3-yl-2(1H)-pyridone nucleobase
  modified_base order(13,15,18,24,27): mod_base = OTHER; note = 2-Prime-Fluoro modified nucleoside
  modified_base order(1..12,14,16..17,19,23,25..26,28..29): mod_base = OTHER; note = 2-Prime-O-Methyl modified nucleoside
  modified_base order(1^2,28^29): mod_base = OTHER; note = (1,3-dimethylimidazolidin-2-ylidene) Phosphoramidate linkage
  modified_base order(2..22,23..28): mod_base = OTHER; note = Phosphorothioate linkage
  modified_base 22^23: mod_base = OTHER; note = Methylphosphonate linkage
  misc_feature 1..29: note = RM109967
ttcggtcaaacctctgaggantgggttca

SEQ ID NO: 176 - DNA, 29 bp, synthetic construct
  source 1..29: mol_type = other DNA
  misc_feature 18..19: note = DNA
  misc_feature order(1..17,20..29): note = RNA
  modified_base 17: mod_base = OTHER; note = 2-Prime-O-Methoxyethyl modified nucleoside
  modified_base 18: mod_base = OTHER; note = DNA nucleotide carrying a 6-amino-5-nitro-3-yl-2(1H)-pyridone nucleobase
  modified_base order(10,12,15,21,24): mod_base = OTHER; note = 2-Prime-Fluoro modified nucleoside
  modified_base order(1..9,11,13..14,16,20,22..23,25..29): mod_base = OTHER; note = 2-Prime-O-Methyl modified nucleoside
  modified_base order(1^2,28^29): mod_base = OTHER; note = (1,3-dimethylimidazolidin-2-ylidene) Phosphoramidate linkage
  modified_base order(2..19,20..28): mod_base = OTHER; note = Phosphorothioate linkage
  modified_base 19^20: mod_base = OTHER; note = Methylphosphonate linkage
  misc_feature 1..29: note = RM109968
ggtcaaacctctgaggantgggttcattt

SEQ ID NO: 177 - DNA, 29 bp, synthetic construct
  source 1..29: mol_type = other DNA
  misc_feature 15..16: note = DNA
  misc_feature order(1..14,17..29): note = RNA
  modified_base 14: mod_base = OTHER; note = 2-Prime-O-Methoxyethyl modified nucleoside
  modified_base 15: mod_base = OTHER; note = DNA nucleotide carrying a 6-amino-5-nitro-3-yl-2(1H)-pyridone nucleobase
  modified_base order(7,9,12,18,21): mod_base = OTHER; note = 2-Prime-Fluoro modified nucleoside
  modified_base order(1..6,8,10..11,13,17,19..20,22..29): mod_base = OTHER; note = 2-Prime-O-Methyl modified nucleoside
  modified_base order(1^2,28^29): mod_base = OTHER; note = (1,3-dimethylimidazolidin-2-ylidene) Phosphoramidate linkage
  modified_base order(2..16,17..28): mod_base = OTHER; note = Phosphorothioate linkage
  modified_base 16^17: mod_base = OTHER; note = Methylphosphonate linkage
  misc_feature 1..29: note = RM109969
caaacctctgaggantgggttcatttttc

SEQ ID NO: 178 - DNA, 29 bp, synthetic construct
  source 1..29: mol_type = other DNA
  misc_feature 12..13: note = DNA
  misc_feature order(1..11,14..29): note = RNA
  modified_base 11: mod_base = OTHER; note = 2-Prime-O-Methoxyethyl modified nucleoside
  modified_base 12: mod_base = OTHER; note = DNA nucleotide carrying a 6-amino-5-nitro-3-yl-2(1H)-pyridone nucleobase
  modified_base order(4,6,9,15,18): mod_base = OTHER; note = 2-Prime-Fluoro modified nucleoside
  modified_base order(1..3,5,7..8,10,14,16..17,19..29): mod_base = OTHER; note = 2-Prime-O-Methyl modified nucleoside
  modified_base order(1^2,28^29): mod_base = OTHER; note = (1,3-dimethylimidazolidin-2-ylidene) Phosphoramidate linkage
  modified_base order(2..13,14..28): mod_base = OTHER; note = Phosphorothioate linkage
  modified_base 13^14: mod_base = OTHER; note = Methylphosphonate linkage
  misc_feature 1..29: note = RM109970
acctctgaggantgggttcatttttcttg

SEQ ID NO: 179 - DNA, 29 bp, synthetic construct
  source 1..29: mol_type = other DNA
  misc_feature 9..10: note = DNA
  misc_feature order(1..8,11..29): note = RNA
  modified_base 8: mod_base = OTHER; note = 2-Prime-O-Methoxyethyl modified nucleoside
  modified_base 9: mod_base = OTHER; note = DNA nucleotide carrying a 6-amino-5-nitro-3-yl-2(1H)-pyridone nucleobase
  modified_base order(1,3,6,12,15): mod_base = OTHER; note = 2-Prime-Fluoro modified nucleoside
  modified_base order(2,4..5,7,11,13..14,16..29): mod_base = OTHER; note = 2-Prime-O-Methyl modified nucleoside
  modified_base order(1^2,28^29): mod_base = OTHER; note = (1,3-dimethylimidazolidin-2-ylidene) Phosphoramidate linkage
  modified_base order(2..10,11..28): mod_base = OTHER; note = Phosphorothioate linkage
  modified_base 10^11: mod_base = OTHER; note = Methylphosphonate linkage
  misc_feature 1..29: note = RM109971
tctgaggantgggttcatttttcttgtct

SEQ ID NO: 180 - DNA, 26 bp, synthetic construct
  source 1..26: mol_type = other DNA
  misc_feature 16..17: note = DNA
  misc_feature order(1..15,18..26): note = RNA
  modified_base 15: mod_base = OTHER; note = 2-Prime-O-Methoxyethyl modified nucleoside
  modified_base 16: mod_base = OTHER; note = DNA nucleotide carrying a 6-amino-5-nitro-3-yl-2(1H)-pyridone nucleobase
  modified_base order(12,19,21,24,26): mod_base = OTHER; note = 2-Prime-Fluoro modified nucleoside
  modified_base order(1..11,13..14,18,20,22..23,25): mod_base = OTHER; note = 2-Prime-O-Methyl modified nucleoside
  modified_base order(1^2,25^26): mod_base = OTHER; note = (1,3-dimethylimidazolidin-2-ylidene) Phosphoramidate linkage
  modified_base order(2..17,18..25): mod_base = OTHER; note = Phosphorothioate linkage
  modified_base 17^18: mod_base = OTHER; note = Methylphosphonate linkage
  misc_feature 1..26: note = RM109972
tcaaacctctgaggantgggttcatt

SEQ ID NO: 181 - DNA, 26 bp, synthetic construct
  source 1..26: mol_type = other DNA
  misc_feature 13..14: note = DNA
  misc_feature order(1..12,15..26): note = RNA
  modified_base 12: mod_base = OTHER; note = 2-Prime-O-Methoxyethyl modified nucleoside
  modified_base 13: mod_base = OTHER; note = DNA nucleotide carrying a 6-amino-5-nitro-3-yl-2(1H)-pyridone nucleobase
  modified_base order(9,16,18,21,23): mod_base = OTHER; note = 2-Prime-Fluoro modified nucleoside
  modified_base order(1..8,10..11,15,17,19..20,22,24..26): mod_base = OTHER; note = 2-Prime-O-Methyl modified nucleoside
  modified_base order(1^2,25^26): mod_base = OTHER; note = (1,3-dimethylimidazolidin-2-ylidene) Phosphoramidate linkage
  modified_base order(2..14,15..25): mod_base = OTHER; note = Phosphorothioate linkage
  modified_base 14^15: mod_base = OTHER; note = Methylphosphonate linkage
  misc_feature 1..26: note = RM109973
aacctctgaggantgggttcattttt

SEQ ID NO: 182 - DNA, 26 bp, synthetic construct
  source 1..26: mol_type = other DNA
  misc_feature 10..11: note = DNA
  misc_feature order(1..9,12..26): note = RNA
  modified_base 9: mod_base = OTHER; note = 2-Prime-O-Methoxyethyl modified nucleoside
  modified_base 10: mod_base = OTHER; note = DNA nucleotide carrying a 6-amino-5-nitro-3-yl-2(1H)-pyridone nucleobase
  modified_base order(6,13,15,18,20): mod_base = OTHER; note = 2-Prime-Fluoro modified nucleoside
  modified_base order(1..5,7..8,12,14,16..17,19,21..26): mod_base = OTHER; note = 2-Prime-O-Methyl modified nucleoside
  modified_base order(1^2,25^26): mod_base = OTHER; note = (1,3-dimethylimidazolidin-2-ylidene) Phosphoramidate linkage
  modified_base order(2..11,12..25): mod_base = OTHER; note = Phosphorothioate linkage
  modified_base 11^12: mod_base = OTHER; note = Methylphosphonate linkage
  misc_feature 1..26: note = RM109974
ctctgaggantgggttcatttttctt

SEQ ID NO: 183 - DNA, 26 bp, synthetic construct
  source 1..26: mol_type = other DNA
  misc_feature 7..8: note = DNA
  misc_feature order(1..6,9..26): note = RNA
  modified_base 6: mod_base = OTHER; note = 2-Prime-O-Methoxyethyl modified nucleoside
  modified_base 7: mod_base = OTHER; note = DNA nucleotide carrying a 6-amino-5-nitro-3-yl-2(1H)-pyridone nucleobase
  modified_base order(3,10,12,15,17): mod_base = OTHER; note = 2-Prime-Fluoro modified nucleoside
  modified_base order(1..2,4..5,9,11,13..14,16,18..26): mod_base = OTHER; note = 2-Prime-O-Methyl modified nucleoside
  modified_base order(1^2,25^26): mod_base = OTHER; note = (1,3-dimethylimidazolidin-2-ylidene) Phosphoramidate linkage
  modified_base order(2..8,9..25): mod_base = OTHER; note = Phosphorothioate linkage
  modified_base 8^9: mod_base = OTHER; note = Methylphosphonate linkage
  misc_feature 1..26: note = RM109975
tgaggantgggttcatttttcttgtc

SEQ ID NO: 184 - DNA, 29 bp, synthetic construct
  source 1..29: mol_type = other DNA
  misc_feature 18..19: note = DNA
  misc_feature order(1..17,20..29): note = RNA
  modified_base 17: mod_base = OTHER; note = 2-Prime-O-Methoxyethyl modified nucleoside
  modified_base 18: mod_base = OTHER; note = DNA nucleotide carrying a 6-amino-5-nitro-3-yl-2(1H)-pyridone nucleobase
  modified_base order(14,21,23,26,28): mod_base = OTHER; note = 2-Prime-Fluoro modified nucleoside
  modified_base order(1..13,15..16,20,22,24..25,27,29): mod_base = OTHER; note = 2-Prime-O-Methyl modified nucleoside
  modified_base order(1^2,28^29): mod_base = OTHER; note = (1,3-dimethylimidazolidin-2-ylidene) Phosphoramidate linkage
  modified_base order(2..19,20..28): mod_base = OTHER; note = Phosphorothioate linkage
  modified_base 19^20: mod_base = OTHER; note = Methylphosphonate linkage
  misc_feature 1..29: note = RM109976
ggtcaaacctctgaggantgggttcattt

SEQ ID NO: 185 - DNA, 29 bp, synthetic construct
  source 1..29: mol_type = other DNA
  misc_feature 15..16: note = DNA
  misc_feature order(1..14,17..29): note = RNA
  modified_base 14: mod_base = OTHER; note = 2-Prime-O-Methoxyethyl modified nucleoside
  modified_base 15: mod_base = OTHER; note = DNA nucleotide carrying a 6-amino-5-nitro-3-yl-2(1H)-pyridone nucleobase
  modified_base order(11,18,20,23,25): mod_base = OTHER; note = 2-Prime-Fluoro modified nucleoside
  modified_base order(1..10,12..13,17,19,21..22,24,26..29): mod_base = OTHER; note = 2-Prime-O-Methyl modified nucleoside
  modified_base order(1^2,28^29): mod_base = OTHER; note = (1,3-dimethylimidazolidin-2-ylidene) Phosphoramidate linkage
  modified_base order(2..16,17..28): mod_base = OTHER; note = Phosphorothioate linkage
  modified_base 16^17: mod_base = OTHER; note = Methylphosphonate linkage
  misc_feature 1..29: note = RM109977
caaacctctgaggantgggttcatttttc

SEQ ID NO: 186 - DNA, 29 bp, synthetic construct
  source 1..29: mol_type = other DNA
  misc_feature 12..13: note = DNA
  misc_feature order(1..11,14..29): note = RNA
  modified_base 11: mod_base = OTHER; note = 2-Prime-O-Methoxyethyl modified nucleoside
  modified_base 12: mod_base = OTHER; note = DNA nucleotide carrying a 6-amino-5-nitro-3-yl-2(1H)-pyridone nucleobase
  modified_base order(8,15,17,20,22): mod_base = OTHER; note = 2-Prime-Fluoro modified nucleoside
  modified_base order(1..7,9..10,14,16,18..19,21,23..29): mod_base = OTHER; note = 2-Prime-O-Methyl modified nucleoside
  modified_base order(1^2,28^29): mod_base = OTHER; note = (1,3-dimethylimidazolidin-2-ylidene) Phosphoramidate linkage
  modified_base order(2..13,14..28): mod_base = OTHER; note = Phosphorothioate linkage
  modified_base 13^14: mod_base = OTHER; note = Methylphosphonate linkage
  misc_feature 1..29: note = RM109978
acctctgaggantgggttcatttttcttg

SEQ ID NO: 187 - DNA, 29 bp, synthetic construct
  source 1..29: mol_type = other DNA
  misc_feature 9..10: note = DNA
  misc_feature order(1..8,11..29): note = RNA
  modified_base 8: mod_base = OTHER; note = 2-Prime-O-Methoxyethyl modified nucleoside
  modified_base 9: mod_base = OTHER; note = DNA nucleotide carrying a 6-amino-5-nitro-3-yl-2(1H)-pyridone nucleobase
  modified_base order(5,12,14,17,19): mod_base = OTHER; note = 2-Prime-Fluoro modified nucleoside
  modified_base order(1..4,6..7,11,13,15..16,18,20..29): mod_base = OTHER; note = 2-Prime-O-Methyl modified nucleoside
  modified_base order(1^2,28^29): mod_base = OTHER; note = (1,3-dimethylimidazolidin-2-ylidene) Phosphoramidate linkage
  modified_base order(2..10,11..28): mod_base = OTHER; note = Phosphorothioate linkage
  modified_base 10^11: mod_base = OTHER; note = Methylphosphonate linkage
  misc_feature 1..29: note = RM109979
tctgaggantgggttcatttttcttgtct

SEQ ID NO: 188 - DNA, 29 bp, synthetic construct
  source 1..29: mol_type = other DNA
  misc_feature 6..7: note = DNA
  misc_feature order(1..5,8..29): note = RNA
  modified_base 5: mod_base = OTHER; note = 2-Prime-O-Methoxyethyl modified nucleoside
  modified_base 6: mod_base = OTHER; note = DNA nucleotide carrying a 6-amino-5-nitro-3-yl-2(1H)-pyridone nucleobase
  modified_base order(2,9,11,14,16): mod_base = OTHER; note = 2-Prime-Fluoro modified nucleoside
  modified_base order(1,3..4,8,10,12..13,15,17..29): mod_base = OTHER; note = 2-Prime-O-Methyl modified nucleoside
  modified_base order(1^2,28^29): mod_base = OTHER; note = (1,3-dimethylimidazolidin-2-ylidene) Phosphoramidate linkage
  modified_base order(2..7,8..28): mod_base = OTHER; note = Phosphorothioate linkage
  modified_base 7^8: mod_base = OTHER; note = Methylphosphonate linkage
  misc_feature 1..29: note = RM109980
gaggantgggttcatttttcttgtctctt

SEQ ID NO: 189 - DNA, 23 bp, synthetic construct
  source 1..23: mol_type = other DNA
  misc_feature 18..19: note = DNA
  misc_feature order(1..17,20..23): note = RNA
  modified_base 17: mod_base = OTHER; note = 2-Prime-O-Methoxyethyl modified nucleoside
  modified_base 18: mod_base = OTHER; note = DNA nucleotide carrying a 6-amino-5-nitro-3-yl-2(1H)-pyridone nucleobase
  modified_base order(15,21): mod_base = OTHER; note = 2-Prime-Fluoro modified nucleoside
  modified_base order(1..14,16,20,22..23): mod_base = OTHER; note = 2-Prime-O-Methyl modified nucleoside
  modified_base order(1^2,22^23): mod_base = OTHER; note = (1,3-dimethylimidazolidin-2-ylidene) Phosphoramidate linkage
  modified_base order(2..19,20..22): mod_base = OTHER; note = Phosphorothioate linkage
  modified_base 19^20: mod_base = OTHER; note = Methylphosphonate linkage
  misc_feature 1..23: note = RM109981
ggtcaaacctctgaggantgggt

SEQ ID NO: 190 - DNA, 23 bp, synthetic construct
  source 1..23: mol_type = other DNA
  misc_feature 15..16: note = DNA
  misc_feature order(1..14,17..23): note = RNA
  modified_base 14: mod_base = OTHER; note = 2-Prime-O-Methoxyethyl modified nucleoside
  modified_base 15: mod_base = OTHER; note = DNA nucleotide carrying a 6-amino-5-nitro-3-yl-2(1H)-pyridone nucleobase
  modified_base order(12,18): mod_base = OTHER; note = 2-Prime-Fluoro modified nucleoside
  modified_base order(1..11,13,17,19..23): mod_base = OTHER; note = 2-Prime-O-Methyl modified nucleoside
  modified_base order(1^2,22^23): mod_base = OTHER; note = (1,3-dimethylimidazolidin-2-ylidene) Phosphoramidate linkage
  modified_base order(2..16,17..22): mod_base = OTHER; note = Phosphorothioate linkage
  modified_base 16^17: mod_base = OTHER; note = Methylphosphonate linkage
  misc_feature 1..23: note = RM109982
caaacctctgaggantgggttca

SEQ ID NO: 191 - DNA, 23 bp, synthetic construct
  source 1..23: mol_type = other DNA
  misc_feature 12..13: note = DNA
  misc_feature order(1..11,14..23): note = RNA
  modified_base 11: mod_base = OTHER; note = 2-Prime-O-Methoxyethyl modified nucleoside
  modified_base 12: mod_base = OTHER; note = DNA nucleotide carrying a 6-amino-5-nitro-3-yl-2(1H)-pyridone nucleobase
  modified_base order(9,15): mod_base = OTHER; note = 2-Prime-Fluoro modified nucleoside
  modified_base order(1..8,10,14,16..23): mod_base = OTHER; note = 2-Prime-O-Methyl modified nucleoside
  modified_base order(1^2,22^23): mod_base = OTHER; note = (1,3-dimethylimidazolidin-2-ylidene) Phosphoramidate linkage
  modified_base order(2..13,14..22): mod_base = OTHER; note = Phosphorothioate linkage
  modified_base 13^14: mod_base = OTHER; note = Methylphosphonate linkage
  misc_feature 1..23: note = RM109983
acctctgaggantgggttcattt

SEQ ID NO: 192 - DNA, 23 bp, synthetic construct
  source 1..23: mol_type = other DNA
  misc_feature 9..10: note = DNA
  misc_feature order(1..8,11..23): note = RNA
  modified_base 8: mod_base = OTHER; note = 2-Prime-O-Methoxyethyl modified nucleoside
  modified_base 9: mod_base = OTHER; note = DNA nucleotide carrying a 6-amino-5-nitro-3-yl-2(1H)-pyridone nucleobase
  modified_base order(6,12): mod_base = OTHER; note = 2-Prime-Fluoro modified nucleoside
  modified_base order(1..5,7,11,13..23): mod_base = OTHER; note = 2-Prime-O-Methyl modified nucleoside
  modified_base order(1^2,22^23): mod_base = OTHER; note = (1,3-dimethylimidazolidin-2-ylidene) Phosphoramidate linkage
  modified_base order(2..10,11..22): mod_base = OTHER; note = Phosphorothioate linkage
  modified_base 10^11: mod_base = OTHER; note = Methylphosphonate linkage
  misc_feature 1..23: note = RM109984
tctgaggantgggttcatttttc

SEQ ID NO: 193 - DNA, 23 bp, synthetic construct
  source 1..23: mol_type = other DNA
  misc_feature 6..7: note = DNA
  misc_feature order(1..5,8..23): note = RNA
  modified_base 5: mod_base = OTHER; note = 2-Prime-O-Methoxyethyl modified nucleoside
  modified_base 6: mod_base = OTHER; note = DNA nucleotide carrying a 6-amino-5-nitro-3-yl-2(1H)-pyridone nucleobase
  modified_base order(3,9): mod_base = OTHER; note = 2-Prime-Fluoro modified nucleoside
  modified_base order(1..2,4,8,10..23): mod_base = OTHER; note = 2-Prime-O-Methyl modified nucleoside
  modified_base order(1^2,22^23): mod_base = OTHER; note = (1,3-dimethylimidazolidin-2-ylidene) Phosphoramidate linkage
  modified_base order(2..7,8..22): mod_base = OTHER; note = Phosphorothioate linkage
  modified_base 7^8: mod_base = OTHER; note = Methylphosphonate linkage
  misc_feature 1..23: note = RM109985
gaggantgggttcatttttcttg

SEQ ID NO: 194 - DNA, 26 bp, synthetic construct
  source 1..26: mol_type = other DNA
  misc_feature 22..23: note = DNA
  misc_feature order(1..21,24..26): note = RNA
  modified_base 21: mod_base = OTHER; note = 2-Prime-O-Methoxyethyl modified nucleoside
  modified_base 22: mod_base = OTHER; note = DNA nucleotide carrying a 6-amino-5-nitro-3-yl-2(1H)-pyridone nucleobase
  modified_base order(19,25): mod_base = OTHER; note = 2-Prime-Fluoro modified nucleoside
  modified_base order(1..18,20,24,26): mod_base = OTHER; note = 2-Prime-O-Methyl modified nucleoside
  modified_base order(1^2,25^26): mod_base = OTHER; note = (1,3-dimethylimidazolidin-2-ylidene) Phosphoramidate linkage
  modified_base order(2..23,24^25): mod_base = OTHER; note = Phosphorothioate linkage
  modified_base 23^24: mod_base = OTHER; note = Methylphosphonate linkage
  misc_feature 1..26: note = RM109986
attcggtcaaacctctgaggantggg

SEQ ID NO: 195 - DNA, 26 bp, synthetic construct
  source 1..26: mol_type = other DNA
  misc_feature 19..20: note = DNA
  misc_feature order(1..18,21..26): note = RNA
  modified_base 18: mod_base = OTHER; note = 2-Prime-O-Methoxyethyl modified nucleoside
  modified_base 19: mod_base = OTHER; note = DNA nucleotide carrying a 6-amino-5-nitro-3-yl-2(1H)-pyridone nucleobase
  modified_base order(16,22): mod_base = OTHER; note = 2-Prime-Fluoro modified nucleoside
  modified_base order(1..15,17,21,23..26): mod_base = OTHER; note = 2-Prime-O-Methyl modified nucleoside
  modified_base order(1^2,25^26): mod_base = OTHER; note = (1,3-dimethylimidazolidin-2-ylidene) Phosphoramidate linkage
  modified_base order(2..20,21..25): mod_base = OTHER; note = Phosphorothioate linkage
  modified_base 20^21: mod_base = OTHER; note = Methylphosphonate linkage
  misc_feature 1..26: note = RM109987
cggtcaaacctctgaggantgggttc

SEQ ID NO: 196 - DNA, 26 bp, synthetic construct
  source 1..26: mol_type = other DNA
  misc_feature 16..17: note = DNA
  misc_feature order(1..15,18..26): note = RNA
  modified_base 15: mod_base = OTHER; note = 2-Prime-O-Methoxyethyl modified nucleoside
  modified_base 16: mod_base = OTHER; note = DNA nucleotide carrying a 6-amino-5-nitro-3-yl-2(1H)-pyridone nucleobase
  modified_base order(13,19): mod_base = OTHER; note = 2-Prime-Fluoro modified nucleoside
  modified_base order(1..12,14,18,20..26): mod_base = OTHER; note = 2-Prime-O-Methyl modified nucleoside
  modified_base order(1^2,25^26): mod_base = OTHER; note = (1,3-dimethylimidazolidin-2-ylidene) Phosphoramidate linkage
  modified_base order(2..17,18..25): mod_base = OTHER; note = Phosphorothioate linkage
  modified_base 17^18: mod_base = OTHER; note = Methylphosphonate linkage
  misc_feature 1..26: note = RM109988
tcaaacctctgaggantgggttcatt

SEQ ID NO: 197 - DNA, 26 bp, synthetic construct
  source 1..26: mol_type = other DNA
  misc_feature 13..14: note = DNA
  misc_feature order(1..12,15..26): note = RNA
  modified_base 12: mod_base = OTHER; note = 2-Prime-O-Methoxyethyl modified nucleoside
  modified_base 13: mod_base = OTHER; note = DNA nucleotide carrying a 6-amino-5-nitro-3-yl-2(1H)-pyridone nucleobase
  modified_base order(10,16): mod_base = OTHER; note = 2-Prime-Fluoro modified nucleoside
  modified_base order(1..9,11,15,17..26): mod_base = OTHER; note = 2-Prime-O-Methyl modified nucleoside
  modified_base order(1^2,25^26): mod_base = OTHER; note = (1,3-dimethylimidazolidin-2-ylidene) Phosphoramidate linkage
  modified_base order(2..14,15..25): mod_base = OTHER; note = Phosphorothioate linkage
  modified_base 14^15: mod_base = OTHER; note = Methylphosphonate linkage
  misc_feature 1..26: note = RM109989
aacctctgaggantgggttcattttt

SEQ ID NO: 198 - DNA, 26 bp, synthetic construct
  source 1..26: mol_type = other DNA
  misc_feature 10..11: note = DNA
  misc_feature order(1..9,12..26): note = RNA
  modified_base 9: mod_base = OTHER; note = 2-Prime-O-Methoxyethyl modified nucleoside
  modified_base 10: mod_base = OTHER; note = DNA nucleotide carrying a 6-amino-5-nitro-3-yl-2(1H)-pyridone nucleobase
  modified_base order(7,13): mod_base = OTHER; note = 2-Prime-Fluoro modified nucleoside
  modified_base order(1..6,8,12,14..26): mod_base = OTHER; note = 2-Prime-O-Methyl modified nucleoside
  modified_base order(1^2,25^26): mod_base = OTHER; note = (1,3-dimethylimidazolidin-2-ylidene) Phosphoramidate linkage
  modified_base order(2..11,12..25): mod_base = OTHER; note = Phosphorothioate linkage
  modified_base 11^12: mod_base = OTHER; note = Methylphosphonate linkage
  misc_feature 1..26: note = RM109990
ctctgaggantgggttcatttttctt

SEQ ID NO: 199 - DNA, 26 bp, synthetic construct
  source 1..26: mol_type = other DNA
  misc_feature 7..8: note = DNA
  misc_feature order(1..6,9..26): note = RNA
  modified_base 6: mod_base = OTHER; note = 2-Prime-O-Methoxyethyl modified nucleoside
  modified_base 7: mod_base = OTHER; note = DNA nucleotide carrying a 6-amino-5-nitro-3-yl-2(1H)-pyridone nucleobase
  modified_base order(4,10): mod_base = OTHER; note = 2-Prime-Fluoro modified nucleoside
  modified_base order(1..3,5,9,11..26): mod_base = OTHER; note = 2-Prime-O-Methyl modified nucleoside
  modified_base order(1^2,25^26): mod_base = OTHER; note = (1,3-dimethylimidazolidin-2-ylidene) Phosphoramidate linkage
  modified_base order(2..8,9..25): mod_base = OTHER; note = Phosphorothioate linkage
  modified_base 8^9: mod_base = OTHER; note = Methylphosphonate linkage
  misc_feature 1..26: note = RM109991
tgaggantgggttcatttttcttgtc

SEQ ID NO: 200 - DNA, 29 bp, synthetic construct
  source 1..29: mol_type = other DNA
  misc_feature 24..25: note = DNA
  misc_feature order(1..23,26..29): note = RNA
  modified_base 23: mod_base = OTHER; note = 2-Prime-O-Methoxyethyl modified nucleoside
  modified_base 24: mod_base = OTHER; note = DNA nucleotide carrying a 6-amino-5-nitro-3-yl-2(1H)-pyridone nucleobase
  modified_base order(21,27): mod_base = OTHER; note = 2-Prime-Fluoro modified nucleoside
  modified_base order(1..20,22,26,28..29): mod_base = OTHER; note = 2-Prime-O-Methyl modified nucleoside
  modified_base order(1^2,28^29): mod_base = OTHER; note = (1,3-dimethylimidazolidin-2-ylidene) Phosphoramidate linkage
  modified_base order(2..25,26..28): mod_base = OTHER; note = Phosphorothioate linkage
  modified_base 25^26: mod_base = OTHER; note = Methylphosphonate linkage
  misc_feature 1..29: note = RM109992
caattcggtcaaacctctgaggantgggt

SEQ ID NO: 201 - DNA, 29 bp, synthetic construct
  source 1..29: mol_type = other DNA
  misc_feature 21..22: note = DNA
  misc_feature order(1..20,23..29): note = RNA
  modified_base 20: mod_base = OTHER; note = 2-Prime-O-Methoxyethyl modified nucleoside
  modified_base 21: mod_base = OTHER; note = DNA nucleotide carrying a 6-amino-5-nitro-3-yl-2(1H)-pyridone nucleobase
  modified_base order(18,24): mod_base = OTHER; note = 2-Prime-Fluoro modified nucleoside
  modified_base order(1..17,19,23,25..29): mod_base = OTHER; note = 2-Prime-O-Methyl modified nucleoside
  modified_base order(1^2,28^29): mod_base = OTHER; note = (1,3-dimethylimidazolidin-2-ylidene) Phosphoramidate linkage
  modified_base order(2..22,23..28): mod_base = OTHER; note = Phosphorothioate linkage
  modified_base 22^23: mod_base = OTHER; note = Methylphosphonate linkage
  misc_feature 1..29: note = RM109993
ttcggtcaaacctctgaggantgggttca

SEQ ID NO: 202 - DNA, 29 bp, synthetic construct
  source 1..29: mol_type = other DNA
  misc_feature 18..19: note = DNA
  misc_feature order(1..17,20..29): note = RNA
  modified_base 17: mod_base = OTHER; note = 2-Prime-O-Methoxyethyl modified nucleoside
  modified_base 18: mod_base = OTHER; note = DNA nucleotide carrying a 6-amino-5-nitro-3-yl-2(1H)-pyridone nucleobase
  modified_base order(15,21): mod_base = OTHER; note = 2-Prime-Fluoro modified nucleoside
  modified_base order(1..14,16,20,22..29): mod_base = OTHER; note = 2-Prime-O-Methyl modified nucleoside
  modified_base order(1^2,28^29): mod_base = OTHER; note = (1,3-dimethylimidazolidin-2-ylidene) Phosphoramidate linkage
  modified_base order(2..19,20..28): mod_base = OTHER; note = Phosphorothioate linkage
  modified_base 19^20: mod_base = OTHER; note = Methylphosphonate linkage
  misc_feature 1..29: note = RM109994
ggtcaaacctctgaggantgggttcattt

SEQ ID NO: 203 - DNA, 29 bp, synthetic construct
  source 1..29: mol_type = other DNA
  misc_feature 15..16: note = DNA
  misc_feature order(1..14,17..29): note = RNA
  modified_base 14: mod_base = OTHER; note = 2-Prime-O-Methoxyethyl modified nucleoside
  modified_base 15: mod_base = OTHER; note = DNA nucleotide carrying a 6-amino-5-nitro-3-yl-2(1H)-pyridone nucleobase
  modified_base order(12,18): mod_base = OTHER; note = 2-Prime-Fluoro modified nucleoside
  modified_base order(1..11,13,17,19..29): mod_base = OTHER; note = 2-Prime-O-Methyl modified nucleoside
  modified_base order(1^2,28^29): mod_base = OTHER; note = (1,3-dimethylimidazolidin-2-ylidene) Phosphoramidate linkage
  modified_base order(2..16,17..28): mod_base = OTHER; note = Phosphorothioate linkage
  modified_base 16^17: mod_base = OTHER; note = Methylphosphonate linkage
  misc_feature 1..29: note = RM109995
caaacctctgaggantgggttcatttttc

SEQ ID NO: 204 - DNA, 29 bp, synthetic construct
  source 1..29: mol_type = other DNA
  misc_feature 12..13: note = DNA
  misc_feature order(1..11,14..29): note = RNA
  modified_base 11: mod_base = OTHER; note = 2-Prime-O-Methoxyethyl modified nucleoside
  modified_base 12: mod_base = OTHER; note = DNA nucleotide carrying a 6-amino-5-nitro-3-yl-2(1H)-pyridone nucleobase
  modified_base order(9,15): mod_base = OTHER; note = 2-Prime-Fluoro modified nucleoside
  modified_base order(1..8,10,14,16..29): mod_base = OTHER; note = 2-Prime-O-Methyl modified nucleoside
  modified_base order(1^2,28^29): mod_base = OTHER; note = (1,3-dimethylimidazolidin-2-ylidene) Phosphoramidate linkage
  modified_base order(2..13,14..28): mod_base = OTHER; note = Phosphorothioate linkage
  modified_base 13^14: mod_base = OTHER; note = Methylphosphonate linkage
  misc_feature 1..29: note = RM109996
acctctgaggantgggttcatttttcttg

SEQ ID NO: 205 - DNA, 29 bp, synthetic construct
  source 1..29: mol_type = other DNA
  misc_feature 9..10: note = DNA
  misc_feature order(1..8,11..29): note = RNA
  modified_base 8: mod_base = OTHER; note = 2-Prime-O-Methoxyethyl modified nucleoside
  modified_base 9: mod_base = OTHER; note = DNA nucleotide carrying a 6-amino-5-nitro-3-yl-2(1H)-pyridone nucleobase
  modified_base order(6,12): mod_base = OTHER; note = 2-Prime-Fluoro modified nucleoside
  modified_base order(1..5,7,11,13..29): mod_base = OTHER; note = 2-Prime-O-Methyl modified nucleoside
  modified_base order(1^2,28^29): mod_base = OTHER; note = (1,3-dimethylimidazolidin-2-ylidene) Phosphoramidate linkage
  modified_base order(2..10,11..28): mod_base = OTHER; note = Phosphorothioate linkage
  modified_base 10^11: mod_base = OTHER; note = Methylphosphonate linkage
  misc_feature 1..29: note = RM109997
tctgaggantgggttcatttttcttgtct

SEQ ID NO: 206 - DNA, 29 bp, synthetic construct
  source 1..29: mol_type = other DNA
  misc_feature 6..7: note = DNA
  misc_feature order(1..5,8..29): note = RNA
  modified_base 5: mod_base = OTHER; note = 2-Prime-O-Methoxyethyl modified nucleoside
  modified_base 6: mod_base = OTHER; note = DNA nucleotide carrying a 6-amino-5-nitro-3-yl-2(1H)-pyridone nucleobase
  modified_base order(3,9): mod_base = OTHER; note = 2-Prime-Fluoro modified nucleoside
  modified_base order(1..2,4,8,10..29): mod_base = OTHER; note = 2-Prime-O-Methyl modified nucleoside
  modified_base order(1^2,28^29): mod_base = OTHER; note = (1,3-dimethylimidazolidin-2-ylidene) Phosphoramidate linkage
  modified_base order(2..7,8..28): mod_base = OTHER; note = Phosphorothioate linkage
  modified_base 7^8: mod_base = OTHER; note = Methylphosphonate linkage
  misc_feature 1..29: note = RM109998
gaggantgggttcatttttcttgtctctt

SEQ ID NO: 207 - DNA, 32 bp, synthetic construct; identical to SEQ ID NO: 133
  source 1..32: mol_type = other DNA
  misc_feature 10..11: note = DNA
  misc_feature order(1..9,12..32): note = RNA
  modified_base 9: mod_base = OTHER; note = 2-Prime-O-Methoxyethyl modified nucleoside
  modified_base 10: mod_base = OTHER; note = DNA nucleotide carrying a 6-amino-5-nitro-3-yl-2(1H)-pyridone nucleobase
  modified_base order(8,13,19..20,26,30): mod_base = OTHER; note = 2-Prime-Fluoro modified nucleoside
  modified_base order(1..7,12,14..18,21..25,27..29,31..32): mod_base = OTHER; note = 2-Prime-O-Methyl modified nucleoside
  modified_base order(1^2,31^32): mod_base = OTHER; note = (1,3-dimethylimidazolidin-2-ylidene) Phosphoramidate linkage
  modified_base order(2..11,12..31): mod_base = OTHER; note = Phosphorothioate linkage
  modified_base 11^12: mod_base = OTHER; note = Methylphosphonate linkage
  misc_feature 1..32: note = RM109999

SEQ ID NO: 208 - DNA, 32 bp, synthetic construct; identical to SEQ ID NO: 134
  source 1..32: mol_type = other DNA
  misc_feature 7..8: note = DNA
  misc_feature order(1..6,9..32): note = RNA
  modified_base 6: mod_base = OTHER; note = 2-Prime-O-Methoxyethyl modified nucleoside
  modified_base 7: mod_base = OTHER; note = DNA nucleotide carrying a 6-amino-5-nitro-3-yl-2(1H)-pyridone nucleobase
  modified_base order(5,10,16..17,23,27): mod_base = OTHER; note = 2-Prime-Fluoro modified nucleoside
  modified_base order(1..4,9,11..15,18..22,24..26,28..32): mod_base = OTHER; note = 2-Prime-O-Methyl modified nucleoside
  modified_base order(1^2,31^32): mod_base = OTHER; note = (1,3-dimethylimidazolidin-2-ylidene) Phosphoramidate linkage
  modified_base order(2..8,9..31): mod_base = OTHER; note = Phosphorothioate linkage
  modified_base 8^9: mod_base = OTHER; note = Methylphosphonate linkage
  misc_feature 1..32: note = RM110000

SEQ ID NO: 209 - DNA, 32 bp, synthetic construct; identical to SEQ ID NO: 127
  source 1..32: mol_type = other DNA
  misc_feature 28..29: note = DNA
  misc_feature order(1..27,30..32): note = RNA
  modified_base 27: mod_base = OTHER; note = 2-Prime-O-Methoxyethyl modified nucleoside
  modified_base 28: mod_base = OTHER; note = DNA nucleotide carrying a 6-amino-5-nitro-3-yl-2(1H)-pyridone nucleobase
  modified_base order(10,14,20..21,31..32): mod_base = OTHER; note = 2-Prime-Fluoro modified nucleoside
  modified_base order(1..9,11..13,15..19,22..26,30): mod_base = OTHER; note = 2-Prime-O-Methyl modified nucleoside
  modified_base order(1^2,31^32): mod_base = OTHER; note = (1,3-dimethylimidazolidin-2-ylidene) Phosphoramidate linkage
  modified_base order(2..29,30^31): mod_base = OTHER; note = Phosphorothioate linkage
  modified_base 29^30: mod_base = OTHER; note = Methylphosphonate linkage
  misc_feature 1..32: note = RM110001

SEQ ID NO: 210 - DNA, 32 bp, synthetic construct; identical to SEQ ID NO: 128
  source 1..32: mol_type = other DNA
  misc_feature 25..26: note = DNA
  misc_feature order(1..24,27..32): note = RNA
  modified_base 24: mod_base = OTHER; note = 2-Prime-O-Methoxyethyl modified nucleoside
  modified_base 25: mod_base = OTHER; note = DNA nucleotide carrying a 6-amino-5-nitro-3-yl-2(1H)-pyridone nucleobase
  modified_base order(7,11,17..18,28..29): mod_base = OTHER; note = 2-Prime-Fluoro modified nucleoside
  modified_base order(1..6,8..10,12..16,19..23,27,30..32): mod_base = OTHER; note = 2-Prime-O-Methyl modified nucleoside
  modified_base order(1^2,31^32): mod_base = OTHER; note = (1,3-dimethylimidazolidin-2-ylidene) Phosphoramidate linkage
  modified_base order(2..26,27..31): mod_base = OTHER; note = Phosphorothioate linkage
  modified_base 26^27: mod_base = OTHER; note = Methylphosphonate linkage
  misc_feature 1..32: note = RM110002

SEQ ID NO: 211 - DNA, 32 bp, synthetic construct; identical to SEQ ID NO: 129
  source 1..32: mol_type = other DNA
  misc_feature 22..23: note = DNA
  misc_feature order(1..21,24..32): note = RNA
  modified_base 21: mod_base = OTHER; note = 2-Prime-O-Methoxyethyl modified nucleoside
  modified_base 22: mod_base = OTHER; note = DNA nucleotide carrying a 6-amino-5-nitro-3-yl-2(1H)-pyridone nucleobase
  modified_base order(4,8,14..15,25..26): mod_base = OTHER; note = 2-Prime-Fluoro modified nucleoside
  modified_base order(1..3,5..7,9..13,16..20,24,27..32): mod_base = OTHER; note = 2-Prime-O-Methyl modified nucleoside
  modified_base order(1^2,31^32): mod_base = OTHER; note = (1,3-dimethylimidazolidin-2-ylidene) Phosphoramidate linkage
  modified_base order(2..23,24..31): mod_base = OTHER; note = Phosphorothioate linkage
  modified_base 23^24: mod_base = OTHER; note = Methylphosphonate linkage
  misc_feature 1..32: note = RM110003

SEQ ID NO: 212 - DNA, 32 bp, synthetic construct; identical to SEQ ID NO: 19
  source 1..32: mol_type = other DNA
  misc_feature 19..20: note = DNA
  misc_feature order(1..18,21..32): note = RNA
  modified_base 18: mod_base = OTHER; note = 2-Prime-O-Methoxyethyl modified nucleoside
  modified_base 19: mod_base = OTHER; note = DNA nucleotide carrying a 6-amino-5-nitro-3-yl-2(1H)-pyridone nucleobase
  modified_base order(1,5,11..12,22..23): mod_base = OTHER; note = 2-Prime-Fluoro modified nucleoside
  modified_base order(2..4,6..10,13..17,21,24..32): mod_base = OTHER; note = 2-Prime-O-Methyl modified nucleoside
  modified_base order(1^2,31^32): mod_base = OTHER; note = (1,3-dimethylimidazolidin-2-ylidene) Phosphoramidate linkage
  modified_base order(2..20,21..31): mod_base = OTHER; note = Phosphorothioate linkage
  modified_base 20^21: mod_base = OTHER; note = Methylphosphonate linkage
  misc_feature 1..32: note = RM110004

SEQ ID NO: 213 - DNA, 23 bp, synthetic construct
  source 1..23: mol_type = other DNA
  misc_feature 12..13: note = DNA
  misc_feature order(1..11,14..23): note = RNA
  modified_base 11: mod_base = OTHER; note = 2-Prime-O-Methoxyethyl modified nucleoside
  modified_base 12: mod_base = OTHER; note = DNA nucleotide carrying a 6-amino-5-nitro-3-yl-2(1H)-pyridone nucleobase
  modified_base order(10,15,21..22): mod_base = OTHER; note = 2-Prime-Fluoro modified nucleoside
  modified_base order(1..9,14,16..20,23): mod_base = OTHER; note = 2-Prime-O-Methyl modified nucleoside
  modified_base order(1^2,22^23): mod_base = OTHER; note = (1,3-dimethylimidazolidin-2-ylidene) Phosphoramidate linkage
  modified_base order(2..13,14..22): mod_base = OTHER; note = Phosphorothioate linkage
  modified_base 13^14: mod_base = OTHER; note = Methylphosphonate linkage
  misc_feature 1..23: note = RM110005
acctctgaggantgggttcattt

SEQ ID NO: 214 - DNA, 23 bp, synthetic construct
  source 1..23: mol_type = other DNA
  misc_feature 9..10: note = DNA
  misc_feature order(1..8,11..23): note = RNA
  modified_base 8: mod_base = OTHER; note = 2-Prime-O-Methoxyethyl modified nucleoside
  modified_base 9: mod_base = OTHER; note = DNA nucleotide carrying a 6-amino-5-nitro-3-yl-2(1H)-pyridone nucleobase
  modified_base order(7,12,18..19): mod_base = OTHER; note = 2-Prime-Fluoro modified nucleoside
  modified_base order(1..6,11,13..17,20..23): mod_base = OTHER; note = 2-Prime-O-Methyl modified nucleoside
  modified_base order(1^2,22^23): mod_base = OTHER; note = (1,3-dimethylimidazolidin-2-ylidene) Phosphoramidate linkage
  modified_base order(2..10,11..22): mod_base = OTHER; note = Phosphorothioate linkage
  modified_base 10^11: mod_base = OTHER; note = Methylphosphonate linkage
  misc_feature 1..23: note = RM110006
tctgaggantgggttcatttttc

SEQ ID NO: 215 - DNA, 23 bp, synthetic construct
  source 1..23: mol_type = other DNA
  misc_feature 6..7: note = DNA
  misc_feature order(1..5,8..23): note = RNA
  modified_base 5: mod_base = OTHER; note = 2-Prime-O-Methoxyethyl modified nucleoside
  modified_base 6: mod_base = OTHER; note = DNA nucleotide carrying a 6-amino-5-nitro-3-yl-2(1H)-pyridone nucleobase
  modified_base order(4,9,15..16): mod_base = OTHER; note = 2-Prime-Fluoro modified nucleoside
  modified_base order(1..3,8,10..14,17..23): mod_base = OTHER; note = 2-Prime-O-Methyl modified nucleoside
  modified_base order(1^2,22^23): mod_base = OTHER; note = (1,3-dimethylimidazolidin-2-ylidene) Phosphoramidate linkage
  modified_base order(2..7,8..22): mod_base = OTHER; note = Phosphorothioate linkage
  modified_base 7^8: mod_base = OTHER; note = Methylphosphonate linkage
  misc_feature 1..23: note = RM110007
gaggantgggttcatttttcttg

SEQ ID NO: 216 - DNA, 23 bp, synthetic construct
  source 1..23: mol_type = other DNA
  misc_feature 18..19: note = DNA
  misc_feature order(1..17,20..23): note = RNA
  modified_base 17: mod_base = OTHER; note = 2-Prime-O-Methoxyethyl modified nucleoside
  modified_base 18: mod_base = OTHER; note = DNA nucleotide carrying a 6-amino-5-nitro-3-yl-2(1H)-pyridone nucleobase
  modified_base order(10..11,21..22): mod_base = OTHER; note = 2-Prime-Fluoro modified nucleoside
  modified_base order(1..9,12..16,20,23): mod_base = OTHER; note = 2-Prime-O-Methyl modified nucleoside
  modified_base order(1^2,22^23): mod_base = OTHER; note = (1,3-dimethylimidazolidin-2-ylidene) Phosphoramidate linkage
  modified_base order(2..19,20..22): mod_base = OTHER; note = Phosphorothioate linkage
  modified_base 19^20: mod_base = OTHER; note = Methylphosphonate linkage
  misc_feature 1..23: note = RM110008
ggtcaaacctctgaggantgggt

SEQ ID NO: 217 - DNA, 23 bp, synthetic construct
  source 1..23: mol_type = other DNA
  misc_feature 15..16: note = DNA
  misc_feature order(1..14,17..23): note = RNA
  modified_base 14: mod_base = OTHER; note = 2-Prime-O-Methoxyethyl modified nucleoside
  modified_base 15: mod_base = OTHER; note = DNA nucleotide carrying a 6-amino-5-nitro-3-yl-2(1H)-pyridone nucleobase
  modified_base order(7..8,18..19): mod_base = OTHER; note = 2-Prime-Fluoro modified nucleoside
  modified_base order(1..6,9..13,17,20..23): mod_base = OTHER; note = 2-Prime-O-Methyl modified nucleoside
  modified_base order(1^2,22^23): mod_base = OTHER; note = (1,3-dimethylimidazolidin-2-ylidene) Phosphoramidate linkage
  modified_base order(2..16,17..22): mod_base = OTHER; note = Phosphorothioate linkage
  modified_base 16^17: mod_base = OTHER; note = Methylphosphonate linkage
  misc_feature 1..23: note = RM110009
caaacctctgaggantgggttca

SEQ ID NO: 218 - DNA, 23 bp, synthetic construct
  source 1..23: mol_type = other DNA
  misc_feature 12..13: note = DNA
  misc_feature order(1..11,14..23): note = RNA
  modified_base 11: mod_base = OTHER; note = 2-Prime-O-Methoxyethyl modified nucleoside
  modified_base 12: mod_base = OTHER; note = DNA nucleotide carrying a 6-amino-5-nitro-3-yl-2(1H)-pyridone nucleobase
  modified_base order(4..5,15..16): mod_base = OTHER; note = 2-Prime-Fluoro modified nucleoside
  modified_base order(1..3,6..10,14,17..23): mod_base = OTHER; note = 2-Prime-O-Methyl modified nucleoside
  modified_base order(1^2,22^23): mod_base = OTHER; note = (1,3-dimethylimidazolidin-2-ylidene) Phosphoramidate linkage
  modified_base order(2..13,14..22): mod_base = OTHER; note = Phosphorothioate linkage
  modified_base 13^14: mod_base = OTHER; note = Methylphosphonate linkage
  misc_feature 1..23: note = RM110010
acctctgaggantgggttcattt

SEQ ID NO: 219 - DNA, 23 bp, synthetic construct
  source 1..23: mol_type = other DNA
  misc_feature 9..10: note = DNA
  misc_feature order(1..8,11..23): note = RNA
  modified_base 8: mod_base = OTHER; note = 2-Prime-O-Methoxyethyl modified nucleoside
  modified_base 9: mod_base = OTHER; note = DNA nucleotide carrying a 6-amino-5-nitro-3-yl-2(1H)-pyridone nucleobase
  modified_base order(1..2,12..13): mod_base = OTHER; note = 2-Prime-Fluoro modified nucleoside
  modified_base order(3..7,11,14..23): mod_base = OTHER; note = 2-Prime-O-Methyl modified nucleoside
  modified_base order(1^2,22^23): mod_base = OTHER; note = (1,3-dimethylimidazolidin-2-ylidene) Phosphoramidate linkage
  modified_base order(2..10,11..22): mod_base = OTHER; note = Phosphorothioate linkage
  modified_base 10^11: mod_base = OTHER; note = Methylphosphonate linkage
  misc_feature 1..23: note = RM110011
tctgaggantgggttcatttttc

SEQ ID NO: 220 - DNA, 23 bp, synthetic construct
  source 1..23: mol_type = other DNA
  misc_feature 18..19: note = DNA
  misc_feature order(1..17,20..23): note = RNA
  modified_base 17: mod_base = OTHER; note = 2-Prime-O-Methoxyethyl modified nucleoside
  modified_base 18: mod_base = OTHER; note = DNA nucleotide carrying a 6-amino-5-nitro-3-yl-2(1H)-pyridone nucleobase
  modified_base order(16,21): mod_base = OTHER; note = 2-Prime-Fluoro modified nucleoside
  modified_base order(1..15,20,22..23): mod_base = OTHER; note = 2-Prime-O-Methyl modified nucleoside
  modified_base order(1^2,22^23): mod_base = OTHER; note = (1,3-dimethylimidazolidin-2-ylidene) Phosphoramidate linkage
  modified_base order(2..19,20..22): mod_base = OTHER; note = Phosphorothioate linkage
  modified_base 19^20: mod_base = OTHER; note = Methylphosphonate linkage
  misc_feature 1..23: note = RM110012
ggtcaaacctctgaggantgggt

SEQ ID NO: 221 - DNA, 23 bp, synthetic construct
  source 1..23: mol_type = other DNA
  misc_feature 15..16: note = DNA
  misc_feature order(1..14,17..23): note = RNA
  modified_base 14: mod_base = OTHER; note = 2-Prime-O-Methoxyethyl modified nucleoside
  modified_base 15: mod_base = OTHER; note = DNA nucleotide carrying a 6-amino-5-nitro-3-yl-2(1H)-pyridone nucleobase
  modified_base order(13,18): mod_base = OTHER; note = 2-Prime-Fluoro modified nucleoside
  modified_base order(1..12,17,19..23): mod_base = OTHER; note = 2-Prime-O-Methyl modified nucleoside
  modified_base order(1^2,22^23): mod_base = OTHER; note = (1,3-dimethylimidazolidin-2-ylidene) Phosphoramidate linkage
  modified_base order(2..16,17..22): mod_base = OTHER; note = Phosphorothioate linkage
  modified_base 16^17: mod_base = OTHER; note = Methylphosphonate linkage
  misc_feature 1..23: note = RM110013
caaacctctgaggantgggttca

SEQ ID NO: 222 - DNA, 23 bp, synthetic construct
  source 1..23: mol_type = other DNA
  misc_feature 12..13: note = DNA
  misc_feature order(1..11,14..23): note = RNA
  modified_base 11: mod_base = OTHER; note = 2-Prime-O-Methoxyethyl modified nucleoside
  modified_base 12: mod_base = OTHER; note = DNA nucleotide carrying a 6-amino-5-nitro-3-yl-2(1H)-pyridone nucleobase
  modified_base order(10,15): mod_base = OTHER; note = 2-Prime-Fluoro modified nucleoside
  modified_base order(1..9,14,16..23): mod_base = OTHER; note = 2-Prime-O-Methyl modified nucleoside
  modified_base order(1^2,22^23): mod_base = OTHER; note = (1,3-dimethylimidazolidin-2-ylidene) Phosphoramidate linkage
  modified_base order(2..13,14..22): mod_base = OTHER; note = Phosphorothioate linkage
  modified_base 13^14: mod_base = OTHER; note = Methylphosphonate linkage
  misc_feature 1..23: note = RM110014
acctctgaggantgggttcattt

SEQ ID NO: 223 - DNA, 23 bp, synthetic construct
  source 1..23: mol_type = other DNA
  misc_feature 9..10: note = DNA
  misc_feature order(1..8,11..23): note = RNA
  modified_base 8: mod_base = OTHER; note = 2-Prime-O-Methoxyethyl modified nucleoside
  modified_base 9: mod_base = OTHER; note = DNA nucleotide carrying a 6-amino-5-nitro-3-yl-2(1H)-pyridone nucleobase
  modified_base order(7,12): mod_base = OTHER; note = 2-Prime-Fluoro modified nucleoside
  modified_base order(1..6,11,13..23): mod_base = OTHER; note = 2-Prime-O-Methyl modified nucleoside
  modified_base order(1^2,22^23): mod_base = OTHER; note = (1,3-dimethylimidazolidin-2-ylidene) Phosphoramidate linkage
  modified_base order(2..10,11..22): mod_base = OTHER; note = Phosphorothioate linkage
  modified_base 10^11: mod_base = OTHER; note = Methylphosphonate linkage
  misc_feature 1..23: note = RM110015
tctgaggantgggttcatttttc

SEQ ID NO: 224 - DNA, 23 bp, synthetic construct
  source 1..23: mol_type = other DNA
  misc_feature 6..7: note = DNA
  misc_feature order(1..5,8..23): note = RNA
  modified_base 5: mod_base = OTHER; note = 2-Prime-O-Methoxyethyl modified nucleoside
  modified_base 6: mod_base = OTHER; note = DNA nucleotide carrying a 6-amino-5-nitro-3-yl-2(1H)-pyridone nucleobase
  modified_base order(4,9): mod_base = OTHER; note = 2-Prime-Fluoro modified nucleoside
  modified_base order(1..3,8,10..23): mod_base = OTHER; note = 2-Prime-O-Methyl modified nucleoside
  modified_base order(1^2,22^23): mod_base = OTHER; note = (1,3-dimethylimidazolidin-2-ylidene) Phosphoramidate linkage
  modified_base order(2..7,8..22): mod_base = OTHER; note = Phosphorothioate linkage
  modified_base 7^8: mod_base = OTHER; note = Methylphosphonate linkage
  misc_feature 1..23: note = RM110016
gaggantgggttcatttttcttg

SEQ ID NO: 225 - DNA, 26 bp, synthetic construct
  source 1..26: mol_type = other DNA
  misc_feature 22..23: note = DNA
  misc_feature order(1..21,24..26): note = RNA
  modified_base 21: mod_base = OTHER; note = 2-Prime-O-Methoxyethyl modified nucleoside
  modified_base 22: mod_base = OTHER; note = DNA nucleotide carrying a 6-amino-5-nitro-3-yl-2(1H)-pyridone nucleobase
  modified_base order(20,25): mod_base = OTHER; note = 2-Prime-Fluoro modified nucleoside
  modified_base order(1..19,24,26): mod_base = OTHER; note = 2-Prime-O-Methyl modified nucleoside
  modified_base order(1^2,25^26): mod_base = OTHER; note = (1,3-dimethylimidazolidin-2-ylidene) Phosphoramidate linkage
  modified_base order(2..23,24^25): mod_base = OTHER; note = Phosphorothioate linkage
  modified_base 23^24: mod_base = OTHER; note = Methylphosphonate linkage
  misc_feature 1..26: note = RM110017
attcggtcaaacctctgaggantggg

SEQ ID NO: 226 - DNA, 26 bp, synthetic construct
  source 1..26: mol_type = other DNA
  misc_feature 19..20: note = DNA
  misc_feature order(1..18,21..26): note = RNA
  modified_base 18: mod_base = OTHER; note = 2-Prime-O-Methoxyethyl modified nucleoside
  modified_base 19: mod_base = OTHER; note = DNA nucleotide carrying a 6-amino-5-nitro-3-yl-2(1H)-pyridone nucleobase
  modified_base order(17,22): mod_base = OTHER; note = 2-Prime-Fluoro modified nucleoside
  modified_base order(1..16,21,23..26): mod_base = OTHER; note = 2-Prime-O-Methyl modified nucleoside
  modified_base order(1^2,25^26): mod_base = OTHER; note = (1,3-dimethylimidazolidin-2-ylidene) Phosphoramidate linkage
  modified_base order(2..20,21..25): mod_base = OTHER; note = Phosphorothioate linkage
  modified_base 20^21: mod_base = OTHER; note = Methylphosphonate linkage
  misc_feature 1..26: note = RM110018
cggtcaaacctctgaggantgggttc

SEQ ID NO: 227 - DNA, 26 bp, synthetic construct
  source 1..26: mol_type = other DNA
  misc_feature 16..17: note = DNA
  misc_feature order(1..15,18..26): note = RNA
  modified_base 15: mod_base = OTHER; note = 2-Prime-O-Methoxyethyl modified nucleoside
  modified_base 16: mod_base = OTHER; note = DNA nucleotide carrying a 6-amino-5-nitro-3-yl-2(1H)-pyridone nucleobase
  modified_base order(14,19): mod_base = OTHER; note = 2-Prime-Fluoro modified nucleoside
  modified_base order(1..13,18,20..26): mod_base = OTHER; note = 2-Prime-O-Methyl modified nucleoside
  modified_base order(1^2,25^26): mod_base = OTHER; note = (1,3-dimethylimidazolidin-2-ylidene) Phosphoramidate linkage
  modified_base order(2..17,18..25): mod_base = OTHER; note = Phosphorothioate linkage
  modified_base 17^18: mod_base = OTHER; note = Methylphosphonate linkage
  misc_feature 1..26: note = RM110019
tcaaacctctgaggantgggttcatt

SEQ ID NO: 228 - DNA, 26 bp, synthetic construct
  source 1..26: mol_type = other DNA
  misc_feature 13..14: note = DNA
  misc_feature order(1..12,15..26): note = RNA
  modified_base 12: mod_base = OTHER; note = 2-Prime-O-Methoxyethyl modified nucleoside
  modified_base 13: mod_base = OTHER; note = DNA nucleotide carrying a 6-amino-5-nitro-3-yl-2(1H)-pyridone nucleobase
  modified_base order(11,16): mod_base = OTHER; note = 2-Prime-Fluoro modified nucleoside
  modified_base order(1..10,15,17..26): mod_base = OTHER; note = 2-Prime-O-Methyl modified nucleoside
  modified_base order(1^2,25^26): mod_base = OTHER; note = (1,3-dimethylimidazolidin-2-ylidene) Phosphoramidate linkage
  modified_base order(2..14,15..25): mod_base = OTHER; note = Phosphorothioate linkage
  modified_base 14^15: mod_base = OTHER; note = Methylphosphonate linkage
  misc_feature 1..26: note = RM110020
aacctctgaggantgggttcattttt

SEQ ID NO: 229 - DNA, 26 bp, synthetic construct
  source 1..26: mol_type = other DNA
  misc_feature 10..11: note = DNA
  misc_feature order(1..9,12..26): note = RNA
  modified_base 9: mod_base = OTHER; note = 2-Prime-O-Methoxyethyl modified nucleoside
  modified_base 10: mod_base = OTHER; note = DNA nucleotide carrying a 6-amino-5-nitro-3-yl-2(1H)-pyridone nucleobase
  modified_base order(8,13): mod_base = OTHER; note = 2-Prime-Fluoro modified nucleoside
  modified_base order(1..7,12,14..26): mod_base = OTHER; note = 2-Prime-O-Methyl modified nucleoside
  modified_base order(1^2,25^26): mod_base = OTHER; note = (1,3-dimethylimidazolidin-2-ylidene) Phosphoramidate linkage
  modified_base order(2..11,12..25): mod_base = OTHER; note = Phosphorothioate linkage
  modified_base 11^12: mod_base = OTHER; note = Methylphosphonate linkage
  misc_feature 1..26: note = RM110021
ctctgaggantgggttcatttttctt

SEQ ID NO: 230 - DNA, 26 bp, synthetic construct
  source 1..26: mol_type = other DNA
  misc_feature 7..8: note = DNA
  misc_feature order(1..6,9..26): note = RNA
  modified_base 6: mod_base = OTHER; note = 2-Prime-O-Methoxyethyl modified nucleoside
  modified_base 7: mod_base = OTHER; note = DNA nucleotide carrying a 6-amino-5-nitro-3-yl-2(1H)-pyridone nucleobase
  modified_base order(5,10): mod_base = OTHER; note = 2-Prime-Fluoro modified nucleoside
  modified_base order(1..4,9,11..26): mod_base = OTHER; note = 2-Prime-O-Methyl modified nucleoside
  modified_base order(1^2,25^26): mod_base = OTHER; note = (1,3-dimethylimidazolidin-2-ylidene) Phosphoramidate linkage
  modified_base order(2..8,9..25): mod_base = OTHER; note = Phosphorothioate linkage
  modified_base 8^9: mod_base = OTHER; note = Methylphosphonate linkage
  misc_feature 1..26: note = RM110022
tgaggantgggttcatttttcttgtc

SEQ ID NO: 231 - DNA, 29 bp, synthetic construct
  source 1..29: mol_type = other DNA
  misc_feature 24..25: note = DNA
  misc_feature order(1..23,26..29): note = RNA
  modified_base 23: mod_base = OTHER; note = 2-Prime-O-Methoxyethyl modified nucleoside
  modified_base 24: mod_base = OTHER; note = DNA nucleotide carrying a 6-amino-5-nitro-3-yl-2(1H)-pyridone nucleobase
  modified_base order(22,27): mod_base = OTHER; note = 2-Prime-Fluoro modified nucleoside
  modified_base order(1..21,26,28..29): mod_base = OTHER; note = 2-Prime-O-Methyl modified nucleoside
  modified_base order(1^2,28^29): mod_base = OTHER; note = (1,3-dimethylimidazolidin-2-ylidene) Phosphoramidate linkage
  modified_base order(2..25,26..28): mod_base = OTHER; note = Phosphorothioate linkage
  modified_base 25^26: mod_base = OTHER; note = Methylphosphonate linkage
  misc_feature 1..29: note = RM110023
caattcggtcaaacctctgaggantgggt

SEQ ID NO: 232 - DNA, 29 bp, synthetic construct
  source 1..29: mol_type = other DNA
  misc_feature 21..22: note = DNA
  misc_feature order(1..20,23..29): note = RNA
  modified_base 20: mod_base = OTHER; note = 2-Prime-O-Methoxyethyl modified nucleoside
  modified_base 21: mod_base = OTHER; note = DNA nucleotide carrying a 6-amino-5-nitro-3-yl-2(1H)-pyridone nucleobase
  modified_base order(19,24): mod_base = OTHER; note = 2-Prime-Fluoro modified nucleoside
  modified_base order(1..18,23,25..29): mod_base = OTHER; note = 2-Prime-O-Methyl modified nucleoside
  modified_base order(1^2,28^29): mod_base = OTHER; note = (1,3-dimethylimidazolidin-2-ylidene) Phosphoramidate linkage
  modified_base order(2..22,23..28): mod_base = OTHER; note = Phosphorothioate linkage
  modified_base 22^23: mod_base = OTHER; note = Methylphosphonate linkage
  misc_feature 1..29: note = RM110024
ttcggtcaaacctctgaggantgggttca

SEQ ID NO: 233 - DNA, 29 bp, synthetic construct
  source 1..29: mol_type = other DNA
  misc_feature 18..19: note = DNA
  misc_feature order(1..17,20..29): note = RNA
  modified_base 17: mod_base = OTHER; note = 2-Prime-O-Methoxyethyl modified nucleoside
  modified_base 18: mod_base = OTHER; note = DNA nucleotide carrying a 6-amino-5-nitro-3-yl-2(1H)-pyridone nucleobase
  modified_base order(16,21): mod_base = OTHER; note = 2-Prime-Fluoro modified nucleoside
  modified_base order(1..15,20,22..29): mod_base = OTHER; note = 2-Prime-O-Methyl modified nucleoside
  modified_base order(1^2,28^29): mod_base = OTHER; note = (1,3-dimethylimidazolidin-2-ylidene) Phosphoramidate linkage
  modified_base order(2..19,20..28): mod_base = OTHER; note = Phosphorothioate linkage
  modified_base 19^20: mod_base = OTHER; note = Methylphosphonate linkage
  misc_feature 1..29: note = RM110025
ggtcaaacctctgaggantgggttcattt

SEQ ID NO: 234 - DNA, 29 bp, synthetic construct
  source 1..29: mol_type = other DNA
  misc_feature 15..16: note = DNA
  misc_feature order(1..14,17..29): note = RNA
  modified_base 14: mod_base = OTHER; note = 2-Prime-O-Methoxyethyl modified nucleoside
  modified_base 15: mod_base = OTHER; note = DNA nucleotide carrying a 6-amino-5-nitro-3-yl-2(1H)-pyridone nucleobase
  modified_base order(13,18): mod_base = OTHER; note = 2-Prime-Fluoro modified nucleoside
  modified_base order(1..12,17,19..29): mod_base = OTHER; note = 2-Prime-O-Methyl modified nucleoside
  modified_base order(1^2,28^29): mod_base = OTHER; note = (1,3-dimethylimidazolidin-2-ylidene) Phosphoramidate linkage
  modified_base order(2..16,17..28): mod_base = OTHER; note = Phosphorothioate linkage
  modified_base 16^17: mod_base = OTHER; note = Methylphosphonate linkage
  misc_feature 1..29: note = RM110026
caaacctctgaggantgggttcatttttc

SEQ ID NO: 235 - DNA, 29 bp, synthetic construct
  source 1..29: mol_type = other DNA
  misc_feature 12..13: note = DNA
  misc_feature order(1..11,14..29): note = RNA
  modified_base 11: mod_base = OTHER; note = 2-Prime-O-Methoxyethyl modified nucleoside
  modified_base 12: mod_base = OTHER; note = DNA nucleotide carrying a 6-amino-5-nitro-3-yl-2(1H)-pyridone nucleobase
  modified_base order(10,15): mod_base = OTHER; note = 2-Prime-Fluoro modified nucleoside
  modified_base order(1..9,14,16..29): mod_base = OTHER; note = 2-Prime-O-Methyl modified nucleoside
  modified_base order(1^2,28^29): mod_base = OTHER; note = (1,3-dimethylimidazolidin-2-ylidene) Phosphoramidate linkage
  modified_base order(2..13,14..28): mod_base = OTHER; note = Phosphorothioate linkage
  modified_base 13^14: mod_base = OTHER; note = Methylphosphonate linkage
  misc_feature 1..29: note = RM110027
acctctgaggantgggttcatttttcttg

SEQ ID NO: 236 - DNA, 29 bp, synthetic construct
  source 1..29: mol_type = other DNA
  misc_feature 9..10: note = DNA
  misc_feature order(1..8,11..29): note = RNA
  modified_base 8: mod_base = OTHER; note = 2-Prime-O-Methoxyethyl modified nucleoside
  modified_base 9: mod_base = OTHER; note = DNA nucleotide carrying a 6-amino-5-nitro-3-yl-2(1H)-pyridone nucleobase
  modified_base order(7,12): mod_base = OTHER; note = 2-Prime-Fluoro modified nucleoside
  modified_base order(1..6,11,13..29): mod_base = OTHER; note = 2-Prime-O-Methyl modified nucleoside
  modified_base order(1^2,28^29): mod_base = OTHER; note = (1,3-dimethylimidazolidin-2-ylidene) Phosphoramidate linkage
  modified_base order(2..10,11..28): mod_base = OTHER; note = Phosphorothioate linkage
  modified_base 10^11: mod_base = OTHER; note = Methylphosphonate linkage
  misc_feature 1..29: note = RM110028
tctgaggantgggttcatttttcttgtct

SEQ ID NO: 237 - DNA, 29 bp, synthetic construct
  source 1..29: mol_type = other DNA
  misc_feature 6..7: note = DNA
  misc_feature order(1..5,8..29): note = RNA
  modified_base 5: mod_base = OTHER; note = 2-Prime-O-Methoxyethyl modified nucleoside
  modified_base 6: mod_base = OTHER; note = DNA nucleotide carrying a 6-amino-5-nitro-3-yl-2(1H)-pyridone nucleobase
  modified_base order(4,9): mod_base = OTHER; note = 2-Prime-Fluoro modified nucleoside
  modified_base order(1..3,8,10..29): mod_base = OTHER; note = 2-Prime-O-Methyl modified nucleoside
  modified_base order(1^2,28^29): mod_base = OTHER; note = (1,3-dimethylimidazolidin-2-ylidene) Phosphoramidate linkage
  modified_base order(2..7,8..28): mod_base = OTHER; note = Phosphorothioate linkage
  modified_base 7^8: mod_base = OTHER; note = Methylphosphonate linkage
  misc_feature 1..29: note = RM110029
gaggantgggttcatttttcttgtctctt

SEQ ID NO: 238 - DNA, 32 bp, synthetic construct; identical to SEQ ID NO: 128
  source 1..32: mol_type = other DNA
  misc_feature 25..26: note = DNA
  misc_feature order(1..24,27..32): note = RNA
  modified_base 24: mod_base = OTHER; note = 2-Prime-O-Methoxyethyl modified nucleoside
  modified_base 25: mod_base = OTHER; note = DNA nucleotide carrying a 6-amino-5-nitro-3-yl-2(1H)-pyridone nucleobase
  modified_base order(3,5,11,14..15,19..20,28,30): mod_base = OTHER; note = 2-Prime-Fluoro modified nucleoside
  modified_base order(1..2,4,6..10,12..13,16..18,21..23,27,29,31..32): mod_base = OTHER; note = 2-Prime-O-Methyl modified nucleoside
  modified_base order(1^2,31^32): mod_base = OTHER; note = (1,3-dimethylimidazolidin-2-ylidene) Phosphoramidate linkage
  modified_base order(2..26,27..31): mod_base = OTHER; note = Phosphorothioate linkage
  modified_base 26^27: mod_base = OTHER; note = Methylphosphonate linkage
  misc_feature 1..32: note = RM110030

SEQ ID NO: 239 - DNA, 32 bp, synthetic construct; identical to SEQ ID NO: 134
  source 1..32: mol_type = other DNA
  misc_feature 7..8: note = DNA
  misc_feature order(1..6,9..32): note = RNA
  modified_base 6: mod_base = OTHER; note = 2-Prime-O-Methoxyethyl modified nucleoside
  modified_base 7: mod_base = OTHER; note = DNA nucleotide carrying a 6-amino-5-nitro-3-yl-2(1H)-pyridone nucleobase
  modified_base order(4,10,14..15,19..20,23,29,31): mod_base = OTHER; note = 2-Prime-Fluoro modified nucleoside
  modified_base order(1..3,5,9,11..13,16..18,21..22,24..28,30,32): mod_base = OTHER; note = 2-Prime-O-Methyl modified nucleoside
  modified_base order(1^2,31^32): mod_base = OTHER; note = (1,3-dimethylimidazolidin-2-ylidene) Phosphoramidate linkage
  modified_base order(2..8,9..31): mod_base = OTHER; note = Phosphorothioate linkage
  modified_base 8^9: mod_base = OTHER; note = Methylphosphonate linkage
  misc_feature 1..32: note = RM110031

SEQ ID NO: 240 - DNA, 23 bp, synthetic construct
  source 1..23: mol_type = other DNA
  misc_feature 18..19: note = DNA
  misc_feature order(1..17,20..23): note = RNA
  modified_base 17: mod_base = OTHER; note = 2-Prime-O-Methoxyethyl modified nucleoside
  modified_base 18: mod_base = OTHER; note = DNA nucleotide carrying a 6-amino-5-nitro-3-yl-2(1H)-pyridone nucleobase
  modified_base order(7..8,12..13,21,23): mod_base = OTHER; note = 2-Prime-Fluoro modified nucleoside
  modified_base order(1..6,9..11,14..16,20,22): mod_base = OTHER; note = 2-Prime-O-Methyl modified nucleoside
  modified_base order(1^2,22^23): mod_base = OTHER; note = (1,3-dimethylimidazolidin-2-ylidene) Phosphoramidate linkage
  modified_base order(2..19,20..22): mod_base = OTHER; note = Phosphorothioate linkage
  modified_base 19^20: mod_base = OTHER; note = Methylphosphonate linkage
  misc_feature 1..23: note = RM110032
ggtcaaacctctgaggantgggt

SEQ ID NO: 241 - DNA, 23 bp, synthetic construct
  source 1..23: mol_type = other DNA
  misc_feature 15..16: note = DNA
  misc_feature order(1..14,17..23): note = RNA
  modified_base 14: mod_base = OTHER; note = 2-Prime-O-Methoxyethyl modified nucleoside
  modified_base 15: mod_base = OTHER; note = DNA nucleotide carrying a 6-amino-5-nitro-3-yl-2(1H)-pyridone nucleobase
  modified_base order(4..5,9..10,18,20): mod_base = OTHER; note = 2-Prime-Fluoro modified nucleoside
  modified_base order(1..3,6..8,11..13,17,19,21..23): mod_base = OTHER; note = 2-Prime-O-Methyl modified nucleoside
  modified_base order(1^2,22^23): mod_base = OTHER; note = (1,3-dimethylimidazolidin-2-ylidene) Phosphoramidate linkage
  modified_base order(2..16,17..22): mod_base = OTHER; note = Phosphorothioate linkage
  modified_base 16^17: mod_base = OTHER; note = Methylphosphonate linkage
  misc_feature 1..23: note = RM110033
caaacctctgaggantgggttca

SEQ ID NO: 242 - DNA, 23 bp, synthetic construct
  source 1..23: mol_type = other DNA
  misc_feature 12..13: note = DNA
  misc_feature order(1..11,14..23): note = RNA
  modified_base 11: mod_base = OTHER; note = 2-Prime-O-Methoxyethyl modified nucleoside
  modified_base 12: mod_base = OTHER; note = DNA nucleotide carrying a 6-amino-5-nitro-3-yl-2(1H)-pyridone nucleobase
  modified_base order(1..2,6..7,15,17): mod_base = OTHER; note = 2-Prime-Fluoro modified nucleoside
  modified_base order(3..5,8..10,14,16,18..23): mod_base = OTHER; note = 2-Prime-O-Methyl modified nucleoside
  modified_base order(1^2,22^23): mod_base = OTHER; note = (1,3-dimethylimidazolidin-2-ylidene) Phosphoramidate linkage
  modified_base order(2..13,14..22): mod_base = OTHER; note = Phosphorothioate linkage
  modified_base 13^14: mod_base = OTHER; note = Methylphosphonate linkage
  misc_feature 1..23: note = RM110034
acctctgaggantgggttcattt

SEQ ID NO: 243 - DNA, 32 bp, synthetic construct; identical to SEQ ID NO: 128
  source 1..32: mol_type = other DNA
  misc_feature 25..26: note = DNA
  misc_feature order(1..24,27..32): note = RNA
  modified_base 24: mod_base = OTHER; note = 2-Prime-O-Methoxyethyl modified nucleoside
  modified_base 25: mod_base = OTHER; note = DNA nucleotide carrying a 6-amino-5-nitro-3-yl-2(1H)-pyridone nucleobase
  modified_base order(14..15,19..20,28,30): mod_base = OTHER; note = 2-Prime-Fluoro modified nucleoside
  modified_base order(1..13,16..18,21..23,27,29,31..32): mod_base = OTHER; note = 2-Prime-O-Methyl modified nucleoside
  modified_base order(1^2,31^32): mod_base = OTHER; note = (1,3-dimethylimidazolidin-2-ylidene) Phosphoramidate linkage
  modified_base order(2..26,27..31): mod_base = OTHER; note = Phosphorothioate linkage
  modified_base 26^27: mod_base = OTHER; note = Methylphosphonate linkage
  misc_feature 1..32: note = RM110035

SEQ ID NO: 244 - DNA, 32 bp, synthetic construct; identical to SEQ ID NO: 129
  source 1..32: mol_type = other DNA
  misc_feature 22..23: note = DNA
  misc_feature order(1..21,24..32): note = RNA
  modified_base 21: mod_base = OTHER; note = 2-Prime-O-Methoxyethyl modified nucleoside
  modified_base 22: mod_base = OTHER; note = DNA nucleotide carrying a 6-amino-5-nitro-3-yl-2(1H)-pyridone nucleobase
  modified_base order(11..12,16..17,25,27): mod_base = OTHER; note = 2-Prime-Fluoro modified nucleoside
  modified_base order(1..10,13..15,18..20,24,26,28..32): mod_base = OTHER; note = 2-Prime-O-Methyl modified nucleoside
  modified_base order(1^2,31^32): mod_base = OTHER; note = (1,3-dimethylimidazolidin-2-ylidene) Phosphoramidate linkage
  modified_base order(2..23,24..31): mod_base = OTHER; note = Phosphorothioate linkage
  modified_base 23^24: mod_base = OTHER; note = Methylphosphonate linkage
  misc_feature 1..32: note = RM110036

SEQ ID NO: 245 - DNA, 32 bp, synthetic construct; identical to SEQ ID NO: 19
  source 1..32: mol_type = other DNA
  misc_feature 19..20: note = DNA
  misc_feature order(1..18,21..32): note = RNA
  modified_base 18: mod_base = OTHER; note = 2-Prime-O-Methoxyethyl modified nucleoside
  modified_base 19: mod_base = OTHER; note = DNA nucleotide carrying a 6-amino-5-nitro-3-yl-2(1H)-pyridone nucleobase
  modified_base order(8..9,13..14,22,24): mod_base = OTHER; note = 2-Prime-Fluoro modified nucleoside
  modified_base order(1..7,10..12,15..17,21,23,25..32): mod_base = OTHER; note = 2-Prime-O-Methyl modified nucleoside
  modified_base order(1^2,31^32): mod_base = OTHER; note = (1,3-dimethylimidazolidin-2-ylidene) Phosphoramidate linkage
  modified_base order(2..20,21..31): mod_base = OTHER; note = Phosphorothioate linkage
  modified_base 20^21: mod_base = OTHER; note = Methylphosphonate linkage
  misc_feature 1..32: note = RM110037

SEQ ID NO: 246 - DNA, 32 bp, synthetic construct; identical to SEQ ID NO: 131
  source 1..32: mol_type = other DNA
  misc_feature 16..17: note = DNA
  misc_feature order(1..15,18..32): note = RNA
  modified_base 15: mod_base = OTHER; note = 2-Prime-O-Methoxyethyl modified nucleoside
  modified_base 16: mod_base = OTHER; note = DNA nucleotide carrying a 6-amino-5-nitro-3-yl-2(1H)-pyridone nucleobase
  modified_base order(5..6,10..11,19,21): mod_base = OTHER; note = 2-Prime-Fluoro modified nucleoside
  modified_base order(1..4,7..9,12..14,18,20,22..32): mod_base = OTHER; note = 2-Prime-O-Methyl modified nucleoside
  modified_base order(1^2,31^32): mod_base = OTHER; note = (1,3-dimethylimidazolidin-2-ylidene) Phosphoramidate linkage
  modified_base order(2..17,18..31): mod_base = OTHER; note = Phosphorothioate linkage
  modified_base 17^18: mod_base = OTHER; note = Methylphosphonate linkage
  misc_feature 1..32: note = RM110038

SEQ ID NO: 247 - DNA, 32 bp, synthetic construct; identical to SEQ ID NO: 132
  source 1..32: mol_type = other DNA
  misc_feature 13..14: note = DNA
  misc_feature order(1..12,15..32): note = RNA
  modified_base 12: mod_base = OTHER; note = 2-Prime-O-Methoxyethyl modified nucleoside
  modified_base 13: mod_base = OTHER; note = DNA nucleotide carrying a 6-amino-5-nitro-3-yl-2(1H)-pyridone nucleobase
  modified_base order(2..3,7..8,16,18): mod_base = OTHER; note = 2-Prime-Fluoro modified nucleoside
  modified_base order(1,4..6,9..11,15,17,19..32): mod_base = OTHER; note = 2-Prime-O-Methyl modified nucleoside
  modified_base order(1^2,31^32): mod_base = OTHER; note = (1,3-dimethylimidazolidin-2-ylidene) Phosphoramidate linkage
  modified_base order(2..14,15..31): mod_base = OTHER; note = Phosphorothioate linkage
  modified_base 14^15: mod_base = OTHER; note = Methylphosphonate linkage
  misc_feature 1..32: note = RM110039

SEQ ID NO: 248 - DNA, 23 bp, synthetic construct
  source 1..23: mol_type = other DNA
  misc_feature 9..10: note = DNA
  misc_feature order(1..8,11..23): note = RNA
  modified_base 8: mod_base = OTHER; note = 2-Prime-O-Methoxyethyl modified nucleoside
  modified_base 9: mod_base = OTHER; note = DNA nucleotide carrying a 6-amino-5-nitro-3-yl-2(1H)-pyridone nucleobase
  modified_base order(6,12,16..17,21..22): mod_base = OTHER; note = 2-Prime-Fluoro modified nucleoside
  modified_base order(1..5,7,11,13..15,18..20,23): mod_base = OTHER; note = 2-Prime-O-Methyl modified nucleoside
  modified_base order(1^2,22^23): mod_base = OTHER; note = (1,3-dimethylimidazolidin-2-ylidene) Phosphoramidate linkage
  modified_base order(2..10,11..22): mod_base = OTHER; note = Phosphorothioate linkage
  modified_base 10^11: mod_base = OTHER; note = Methylphosphonate linkage
  misc_feature 1..23: note = RM110040
tctgaggantgggttcatttttc

SEQ ID NO: 249 - DNA, 23 bp, synthetic construct
  source 1..23: mol_type = other DNA
  misc_feature 6..7: note = DNA
  misc_feature order(1..5,8..23): note = RNA
  modified_base 5: mod_base = OTHER; note = 2-Prime-O-Methoxyethyl modified nucleoside
  modified_base 6: mod_base = OTHER; note = DNA nucleotide carrying a 6-amino-5-nitro-3-yl-2(1H)-pyridone nucleobase
  modified_base order(3,9,13..14,18..19): mod_base = OTHER; note = 2-Prime-Fluoro modified nucleoside
  modified_base order(1..2,4,8,10..12,15..17,20..23): mod_base = OTHER; note = 2-Prime-O-Methyl modified nucleoside
  modified_base order(1^2,22^23): mod_base = OTHER; note = (1,3-dimethylimidazolidin-2-ylidene) Phosphoramidate linkage
  modified_base order(2..7,8..22): mod_base = OTHER; note = Phosphorothioate linkage
  modified_base 7^8: mod_base = OTHER; note = Methylphosphonate linkage
  misc_feature 1..23: note = RM110041
gaggantgggttcatttttcttg

SEQ ID NO: 250 - DNA, 32 bp, synthetic construct; identical to SEQ ID NO: 19
  source 1..32: mol_type = other DNA
  misc_feature 19..20: note = DNA
  misc_feature order(1..18,21..32): note = RNA
  modified_base 18: mod_base = OTHER; note = 2-Prime-O-Methoxyethyl modified nucleoside
  modified_base 19: mod_base = OTHER; note = DNA nucleotide carrying a 6-amino-5-nitro-3-yl-2(1H)-pyridone nucleobase
  modified_base order(16,22,26..27,31..32): mod_base = OTHER; note = 2-Prime-Fluoro modified nucleoside
  modified_base order(1..15,17,21,23..25,28..30): mod_base = OTHER; note = 2-Prime-O-Methyl modified nucleoside
  modified_base order(1^2,31^32): mod_base = OTHER; note = (1,3-dimethylimidazolidin-2-ylidene) Phosphoramidate linkage
  modified_base order(2..20,21..31): mod_base = OTHER; note = Phosphorothioate linkage
  modified_base 20^21: mod_base = OTHER; note = Methylphosphonate linkage
  misc_feature 1..32: note = RM110042

SEQ ID NO: 251 - DNA, 32 bp, synthetic construct; identical to SEQ ID NO: 131
  source 1..32: mol_type = other DNA
  misc_feature 16..17: note = DNA
  misc_feature order(1..15,18..32): note = RNA
  modified_base 15: mod_base = OTHER; note = 2-Prime-O-Methoxyethyl modified nucleoside
  modified_base 16: mod_base = OTHER; note = DNA nucleotide carrying a 6-amino-5-nitro-3-yl-2(1H)-pyridone nucleobase
  modified_base order(13,19,23..24,28..29): mod_base = OTHER; note = 2-Prime-Fluoro modified nucleoside
  modified_base order(1..12,14,18,20..22,25..27,30..32): mod_base = OTHER; note = 2-Prime-O-Methyl modified nucleoside
  modified_base order(1^2,31^32): mod_base = OTHER; note = (1,3-dimethylimidazolidin-2-ylidene) Phosphoramidate linkage
  modified_base order(2..17,18..31): mod_base = OTHER; note = Phosphorothioate linkage
  modified_base 17^18: mod_base = OTHER; note = Methylphosphonate linkage
  misc_feature 1..32: note = RM110043

SEQ ID NO: 252 - DNA, 32 bp, synthetic construct; identical to SEQ ID NO: 132
  source 1..32: mol_type = other DNA
  misc_feature 13..14: note = DNA
  misc_feature order(1..12,15..32): note = RNA
  modified_base 12: mod_base = OTHER; note = 2-Prime-O-Methoxyethyl modified nucleoside
  modified_base 13: mod_base = OTHER; note = DNA nucleotide carrying a 6-amino-5-nitro-3-yl-2(1H)-pyridone nucleobase
  modified_base order(10,16,20..21,25..26): mod_base = OTHER; note = 2-Prime-Fluoro modified nucleoside
  modified_base order(1..9,11,15,17..19,22..24,27..32): mod_base = OTHER; note = 2-Prime-O-Methyl modified nucleoside
  modified_base order(1^2,31^32): mod_base = OTHER; note = (1,3-dimethylimidazolidin-2-ylidene) Phosphoramidate linkage
  modified_base order(2..14,15..31): mod_base = OTHER; note = Phosphorothioate linkage
  modified_base 14^15: mod_base = OTHER; note = Methylphosphonate linkage
  misc_feature 1..32: note = RM110044

SEQ ID NO: 253 - DNA, 32 bp, synthetic construct; identical to SEQ ID NO: 133
  source 1..32: mol_type = other DNA
  misc_feature 10..11: note = DNA
  misc_feature order(1..9,12..32): note = RNA
  modified_base 9: mod_base = OTHER; note = 2-Prime-O-Methoxyethyl modified nucleoside
  modified_base 10: mod_base = OTHER; note = DNA nucleotide carrying a 6-amino-5-nitro-3-yl-2(1H)-pyridone nucleobase
  modified_base order(7,13,17..18,22..23): mod_base = OTHER; note = 2-Prime-Fluoro modified nucleoside
  modified_base order(1..6,8,12,14..16,19..21,24..32): mod_base = OTHER; note = 2-Prime-O-Methyl modified nucleoside
  modified_base order(1^2,31^32): mod_base = OTHER; note = (1,3-dimethylimidazolidin-2-ylidene) Phosphoramidate linkage
  modified_base order(2..11,12..31): mod_base = OTHER; note = Phosphorothioate linkage
  modified_base 11^12: mod_base = OTHER; note = Methylphosphonate linkage
  misc_feature 1..32: note = RM110045

SEQ ID NO: 254 - DNA, 32 bp, synthetic construct; identical to SEQ ID NO: 134
  source 1..32: mol_type = other DNA
  misc_feature 7..8: note = DNA
  misc_feature order(1..6,9..32): note = RNA
  modified_base 6: mod_base = OTHER; note = 2-Prime-O-Methoxyethyl modified nucleoside
  modified_base 7: mod_base = OTHER; note = DNA nucleotide carrying a 6-amino-5-nitro-3-yl-2(1H)-pyridone nucleobase
  modified_base order(4,10,14..15,19..20): mod_base = OTHER; note = 2-Prime-Fluoro modified nucleoside
  modified_base order(1..3,5,9,11..13,16..18,21..32): mod_base = OTHER; note = 2-Prime-O-Methyl modified nucleoside
  modified_base order(1^2,31^32): mod_base = OTHER; note = (1,3-dimethylimidazolidin-2-ylidene) Phosphoramidate linkage
  modified_base order(2..8,9..31): mod_base = OTHER; note = Phosphorothioate linkage
  modified_base 8^9: mod_base = OTHER; note = Methylphosphonate linkage
  misc_feature 1..32: note = RM110046

SEQ ID NO: 255 - DNA, 32 bp, synthetic construct; identical to SEQ ID NO: 127
  source 1..32: mol_type = other DNA
  misc_feature 28..29: note = DNA
  misc_feature order(1..27,30..32): note = RNA
  modified_base 27: mod_base = OTHER; note = 2-Prime-O-Methoxyethyl modified nucleoside
  modified_base 28: mod_base = OTHER; note = DNA nucleotide carrying a 6-amino-5-nitro-3-yl-2(1H)-pyridone nucleobase
  modified_base order(22..23,31): mod_base = OTHER; note = 2-Prime-Fluoro modified nucleoside
  modified_base order(1..21,24..26,30,32): mod_base = OTHER; note = 2-Prime-O-Methyl modified nucleoside
  modified_base order(1^2,31^32): mod_base = OTHER; note = (1,3-dimethylimidazolidin-2-ylidene) Phosphoramidate linkage
  modified_base order(2..29,30^31): mod_base = OTHER; note = Phosphorothioate linkage
  modified_base 29^30: mod_base = OTHER; note = Methylphosphonate linkage
  misc_feature 1..32: note = RM110047

SEQ ID NO: 256 - DNA, 32 bp, synthetic construct; identical to SEQ ID NO: 128
  source 1..32: mol_type = other DNA
  misc_feature 25..26: note = DNA
  misc_feature order(1..24,27..32): note = RNA
  modified_base 24: mod_base = OTHER; note = 2-Prime-O-Methoxyethyl modified nucleoside
  modified_base 25: mod_base = OTHER; note = DNA nucleotide carrying a 6-amino-5-nitro-3-yl-2(1H)-pyridone nucleobase
  modified_base order(19..20,28): mod_base = OTHER; note = 2-Prime-Fluoro modified nucleoside
  modified_base order(1..18,21..23,27,29..32): mod_base = OTHER; note = 2-Prime-O-Methyl modified nucleoside
  modified_base order(1^2,31^32): mod_base = OTHER; note = (1,3-dimethylimidazolidin-2-ylidene) Phosphoramidate linkage
  modified_base order(2..26,27..31): mod_base = OTHER; note = Phosphorothioate linkage
  modified_base 26^27: mod_base = OTHER; note = Methylphosphonate linkage
  misc_feature 1..32: note = RM110048

SEQ ID NO: 257 - DNA, 32 bp, synthetic construct; identical to SEQ ID NO: 129
  source 1..32: mol_type = other DNA
  misc_feature 22..23: note = DNA
  misc_feature order(1..21,24..32): note = RNA
  modified_base 21: mod_base = OTHER; note = 2-Prime-O-Methoxyethyl modified nucleoside
  modified_base 22: mod_base = OTHER; note = DNA nucleotide carrying a 6-amino-5-nitro-3-yl-2(1H)-pyridone nucleobase
  modified_base order(16..17,25): mod_base = OTHER; note = 2-Prime-Fluoro modified nucleoside
  modified_base order(1..15,18..20,24,26..32): mod_base = OTHER; note = 2-Prime-O-Methyl modified nucleoside
  modified_base order(1^2,31^32): mod_base = OTHER; note = (1,3-dimethylimidazolidin-2-ylidene) Phosphoramidate linkage
  modified_base order(2..23,24..31): mod_base = OTHER; note = Phosphorothioate linkage
  modified_base 23^24: mod_base = OTHER; note = Methylphosphonate linkage
  misc_feature 1..32: note = RM110049

SEQ ID NO: 258 - DNA, 32 bp, synthetic construct; identical to SEQ ID NO: 19
  source 1..32: mol_type = other DNA
  misc_feature 19..20: note = DNA
  misc_feature order(1..18,21..32): note = RNA
  modified_base 18: mod_base = OTHER; note = 2-Prime-O-Methoxyethyl modified nucleoside
  modified_base 19: mod_base = OTHER; note = DNA nucleotide carrying a 6-amino-5-nitro-3-yl-2(1H)-pyridone nucleobase
  modified_base order(13..14,22): mod_base = OTHER; note = 2-Prime-Fluoro modified nucleoside
  modified_base order(1..12,15..17,21,23..32): mod_base = OTHER; note = 2-Prime-O-Methyl modified nucleoside
  modified_base order(1^2,31^32): mod_base = OTHER; note = (1,3-dimethylimidazolidin-2-ylidene) Phosphoramidate linkage
  modified_base order(2..20,21..31): mod_base = OTHER; note = Phosphorothioate linkage
  modified_base 20^21: mod_base = OTHER; note = Methylphosphonate linkage
  misc_feature 1..32: note = RM110050

SEQ ID NO: 259 - DNA, 32 bp, synthetic construct; identical to SEQ ID NO: 131
  source 1..32: mol_type = other DNA
  misc_feature 16..17: note = DNA
  misc_feature order(1..15,18..32): note = RNA
  modified_base 15: mod_base = OTHER; note = 2-Prime-O-Methoxyethyl modified nucleoside
  modified_base 16: mod_base = OTHER; note = DNA nucleotide carrying a 6-amino-5-nitro-3-yl-2(1H)-pyridone nucleobase
  modified_base order(10..11,19): mod_base = OTHER; note = 2-Prime-Fluoro modified nucleoside
  modified_base order(1..9,12..14,18,20..32): mod_base = OTHER; note = 2-Prime-O-Methyl modified nucleoside
  modified_base order(1^2,31^32): mod_base = OTHER; note = (1,3-dimethylimidazolidin-2-ylidene) Phosphoramidate linkage
  modified_base order(2..17,18..31): mod_base = OTHER; note = Phosphorothioate linkage
  modified_base 17^18: mod_base = OTHER; note = Methylphosphonate linkage
  misc_feature 1..32: note = RM110051

SEQ ID NO: 260 - DNA, 32 bp, synthetic construct; identical to SEQ ID NO: 132
  source 1..32: mol_type = other DNA
  misc_feature 13..14: note = DNA
  misc_feature order(1..12,15..32): note = RNA
  modified_base 12: mod_base = OTHER; note = 2-Prime-O-Methoxyethyl modified nucleoside
  modified_base 13: mod_base = OTHER; note = DNA nucleotide carrying a 6-amino-5-nitro-3-yl-2(1H)-pyridone nucleobase
  modified_base order(7..8,16): mod_base = OTHER; note = 2-Prime-Fluoro modified nucleoside
  modified_base order(1..6,9..11,15,17..32): mod_base = OTHER; note = 2-Prime-O-Methyl modified nucleoside
  modified_base order(1^2,31^32): mod_base = OTHER; note = (1,3-dimethylimidazolidin-2-ylidene) Phosphoramidate linkage
  modified_base order(2..14,15..31): mod_base = OTHER; note = Phosphorothioate linkage
  modified_base 14^15: mod_base = OTHER; note = Methylphosphonate linkage
  misc_feature 1..32: note = RM110052

SEQ ID NO: 261 - DNA, 32 bp, synthetic construct; identical to SEQ ID NO: 133
  source 1..32: mol_type = other DNA
  misc_feature 10..11: note = DNA
  misc_feature order(1..9,12..32): note = RNA
  modified_base 9: mod_base = OTHER; note = 2-Prime-O-Methoxyethyl modified nucleoside
  modified_base 10: mod_base = OTHER; note = DNA nucleotide carrying a 6-amino-5-nitro-3-yl-2(1H)-pyridone nucleobase
  modified_base order(4..5,13): mod_base = OTHER; note = 2-Prime-Fluoro modified nucleoside
  modified_base order(1..3,6..8,12,14..32): mod_base = OTHER; note = 2-Prime-O-Methyl modified nucleoside
  modified_base order(1^2,31^32): mod_base = OTHER; note = (1,3-dimethylimidazolidin-2-ylidene) Phosphoramidate linkage
  modified_base order(2..11,12..31): mod_base = OTHER; note = Phosphorothioate linkage
  modified_base 11^12: mod_base = OTHER; note = Methylphosphonate linkage
  misc_feature 1..32: note = RM110053

SEQ ID NO: 262 - DNA, 32 bp, synthetic construct; identical to SEQ ID NO: 134
  source 1..32: mol_type = other DNA
  misc_feature 7..8: note = DNA
  misc_feature order(1..6,9..32): note = RNA
  modified_base 6: mod_base = OTHER; note = 2-Prime-O-Methoxyethyl modified nucleoside
  modified_base 7: mod_base = OTHER; note = DNA nucleotide carrying a 6-amino-5-nitro-3-yl-2(1H)-pyridone nucleobase
  modified_base order(1..2,10): mod_base = OTHER; note = 2-Prime-Fluoro modified nucleoside
  modified_base order(3..5,9,11..32): mod_base = OTHER; note = 2-Prime-O-Methyl modified nucleoside
  modified_base order(1^2,31^32): mod_base = OTHER; note = (1,3-dimethylimidazolidin-2-ylidene) Phosphoramidate linkage
  modified_base order(2..8,9..31): mod_base = OTHER; note = Phosphorothioate linkage
  modified_base 8^9: mod_base = OTHER; note = Methylphosphonate linkage
  misc_feature 1..32: note = RM110054

SEQ ID NO: 263 - DNA, 26 bp, synthetic construct
  source 1..26: mol_type = other DNA
  misc_feature 22..23: note = DNA
  misc_feature order(1..21,24..26): note = RNA
  modified_base 21: mod_base = OTHER; note = 2-Prime-O-Methoxyethyl modified nucleoside
  modified_base 22: mod_base = OTHER; note = DNA nucleotide carrying a 6-amino-5-nitro-3-yl-2(1H)-pyridone nucleobase
  modified_base order(1,3,9,12,14,20,25): mod_base = OTHER; note = 2-Prime-Fluoro modified nucleoside
  modified_base order(2,4..8,10..11,13,15..19,24,26): mod_base = OTHER; note = 2-Prime-O-Methyl modified nucleoside
  modified_base order(1^2,25^26): mod_base = OTHER; note = (1,3-dimethylimidazolidin-2-ylidene) Phosphoramidate linkage
  modified_base order(2..23,24^25): mod_base = OTHER; note = Phosphorothioate linkage
  modified_base 23^24: mod_base = OTHER; note = Methylphosphonate linkage
  misc_feature 1..26: note = RM110055
attcggtcaaacctctgaggantggg

SEQ ID NO: 264 - DNA, 26 bp, synthetic construct
  source 1..26: mol_type = other DNA
  misc_feature 22..23: note = DNA
  misc_feature order(1..21,24..26): note = RNA
  modified_base 21: mod_base = OTHER; note = 2-Prime-O-Methoxyethyl modified nucleoside
  modified_base 22: mod_base = OTHER; note = DNA nucleotide carrying a 6-amino-5-nitro-3-yl-2(1H)-pyridone nucleobase
  modified_base order(9,12,14,20,25): mod_base = OTHER; note = 2-Prime-Fluoro modified nucleoside
  modified_base order(1..8,10..11,13,15..19,24,26): mod_base = OTHER; note = 2-Prime-O-Methyl modified nucleoside
  modified_base order(1^2,25^26): mod_base = OTHER; note = (1,3-dimethylimidazolidin-2-ylidene) Phosphoramidate linkage
  modified_base order(2..23,24^25): mod_base = OTHER; note = Phosphorothioate linkage
  modified_base 23^24: mod_base = OTHER; note = Methylphosphonate linkage
  misc_feature 1..26: note = RM110056
attcggtcaaacctctgaggantggg

SEQ ID NO: 265 - DNA, 26 bp, synthetic construct
  source 1..26: mol_type = other DNA
  misc_feature 19..20: note = DNA
  misc_feature order(1..18,21..26): note = RNA
  modified_base 18: mod_base = OTHER; note = 2-Prime-O-Methoxyethyl modified nucleoside
  modified_base 19: mod_base = OTHER; note = DNA nucleotide carrying a 6-amino-5-nitro-3-yl-2(1H)-pyridone nucleobase
  modified_base order(6,9,11,17,22): mod_base = OTHER; note = 2-Prime-Fluoro modified nucleoside
  modified_base order(1..5,7..8,10,12..16,21,23..26): mod_base = OTHER; note = 2-Prime-O-Methyl modified nucleoside
  modified_base order(1^2,25^26): mod_base = OTHER; note = (1,3-dimethylimidazolidin-2-ylidene) Phosphoramidate linkage
  modified_base order(2..20,21..25): mod_base = OTHER; note = Phosphorothioate linkage
  modified_base 20^21: mod_base = OTHER; note = Methylphosphonate linkage
  misc_feature 1..26: note = RM110057
cggtcaaacctctgaggantgggttc

SEQ ID NO: 266 - DNA, 26 bp, synthetic construct
  source 1..26: mol_type = other DNA
  misc_feature 16..17: note = DNA
  misc_feature order(1..15,18..26): note = RNA
  modified_base 15: mod_base = OTHER; note = 2-Prime-O-Methoxyethyl modified nucleoside
  modified_base 16: mod_base = OTHER; note = DNA nucleotide carrying a 6-amino-5-nitro-3-yl-2(1H)-pyridone nucleobase
  modified_base order(3,6,8,14,19): mod_base = OTHER; note = 2-Prime-Fluoro modified nucleoside
  modified_base order(1..2,4..5,7,9..13,18,20..26): mod_base = OTHER; note = 2-Prime-O-Methyl modified nucleoside
  modified_base order(1^2,25^26): mod_base = OTHER; note = (1,3-dimethylimidazolidin-2-ylidene) Phosphoramidate linkage
  modified_base order(2..17,18..25): mod_base = OTHER; note = Phosphorothioate linkage
  modified_base 17^18: mod_base = OTHER; note = Methylphosphonate linkage
  misc_feature 1..26: note = RM110058
tcaaacctctgaggantgggttcatt

SEQ ID NO: 267 - DNA, 29 bp, synthetic construct
  source 1..29: mol_type = other DNA
  misc_feature 24..25: note = DNA
  misc_feature order(1..23,26..29): note = RNA
  modified_base 23: mod_base = OTHER; note = 2-Prime-O-Methoxyethyl modified nucleoside
  modified_base 24: mod_base = OTHER; note = DNA nucleotide carrying a 6-amino-5-nitro-3-yl-2(1H)-pyridone nucleobase
  modified_base order(11,14,16,22,27): mod_base = OTHER; note = 2-Prime-Fluoro modified nucleoside
  modified_base order(1..10,12..13,15,17..21,26,28..29): mod_base = OTHER; note = 2-Prime-O-Methyl modified nucleoside
  modified_base order(1^2,28^29): mod_base = OTHER; note = (1,3-dimethylimidazolidin-2-ylidene) Phosphoramidate linkage
  modified_base order(2..25,26..28): mod_base = OTHER; note = Phosphorothioate linkage
  modified_base 25^26: mod_base = OTHER; note = Methylphosphonate linkage
  misc_feature 1..29: note = RM110059
caattcggtcaaacctctgaggantgggt

SEQ ID NO: 268 - DNA, 29 bp, synthetic construct
  source 1..29: mol_type = other DNA
  misc_feature 21..22: note = DNA
  misc_feature order(1..20,23..29): note = RNA
  modified_base 20: mod_base = OTHER; note = 2-Prime-O-Methoxyethyl modified nucleoside
  modified_base 21: mod_base = OTHER; note = DNA nucleotide carrying a 6-amino-5-nitro-3-yl-2(1H)-pyridone nucleobase
  modified_base order(8,11,13,19,24): mod_base = OTHER; note = 2-Prime-Fluoro modified nucleoside
  modified_base order(1..7,9..10,12,14..18,23,25..29): mod_base = OTHER; note = 2-Prime-O-Methyl modified nucleoside
  modified_base order(1^2,28^29): mod_base = OTHER; note = (1,3-dimethylimidazolidin-2-ylidene) Phosphoramidate linkage
  modified_base order(2..22,23..28): mod_base = OTHER; note = Phosphorothioate linkage
  modified_base 22^23: mod_base = OTHER; note = Methylphosphonate linkage
  misc_feature 1..29: note = RM110060
ttcggtcaaacctctgaggantgggttca

SEQ ID NO: 269 - DNA, 29 bp, synthetic construct
  source 1..29: mol_type = other DNA
  misc_feature 18..19: note = DNA
  misc_feature order(1..17,20..29): note = RNA
  modified_base 17: mod_base = OTHER; note = 2-Prime-O-Methoxyethyl modified nucleoside
  modified_base 18: mod_base = OTHER; note = DNA nucleotide carrying a 6-amino-5-nitro-3-yl-2(1H)-pyridone nucleobase
  modified_base order(5,8,10,16,21): mod_base = OTHER; note = 2-Prime-Fluoro modified nucleoside
  modified_base order(1..4,6..7,9,11..15,20,22..29): mod_base = OTHER; note = 2-Prime-O-Methyl modified nucleoside
  modified_base order(1^2,28^29): mod_base = OTHER; note = (1,3-dimethylimidazolidin-2-ylidene) Phosphoramidate linkage
  modified_base order(2..19,20..28): mod_base = OTHER; note = Phosphorothioate linkage
  modified_base 19^20: mod_base = OTHER; note = Methylphosphonate linkage
  misc_feature 1..29: note = RM110061
ggtcaaacctctgaggantgggttcattt

SEQ ID NO: 270 - DNA, 29 bp, synthetic construct
  source 1..29: mol_type = other DNA
  misc_feature 15..16: note = DNA
  misc_feature order(1..14,17..29): note = RNA
  modified_base 14: mod_base = OTHER; note = 2-Prime-O-Methoxyethyl modified nucleoside
  modified_base 15: mod_base = OTHER; note = DNA nucleotide carrying a 6-amino-5-nitro-3-yl-2(1H)-pyridone nucleobase
  modified_base order(2,5,7,13,18): mod_base = OTHER; note = 2-Prime-Fluoro modified nucleoside
  modified_base order(1,3..4,6,8..12,17,19..29): mod_base = OTHER; note = 2-Prime-O-Methyl modified nucleoside
  modified_base order(1^2,28^29): mod_base = OTHER; note = (1,3-dimethylimidazolidin-2-ylidene) Phosphoramidate linkage
  modified_base order(2..16,17..28): mod_base = OTHER; note = Phosphorothioate linkage
  modified_base 16^17: mod_base = OTHER; note = Methylphosphonate linkage
  misc_feature 1..29: note = RM110062
caaacctctgaggantgggttcatttttc

SEQ ID NO: 271 - DNA, 32 bp, synthetic construct; identical to SEQ ID NO: 128
  source 1..32: mol_type = other DNA
  misc_feature 25..26: note = DNA
  misc_feature order(1..24,27..32): note = RNA
  modified_base 24: mod_base = OTHER; note = 2-Prime-O-Methoxyethyl modified nucleoside
  modified_base 25: mod_base = OTHER; note = DNA nucleotide carrying a 6-amino-5-nitro-3-yl-2(1H)-pyridone nucleobase
  modified_base order(2,11,16,20,22..23,28..30): mod_base = OTHER; note = 2-Prime-Fluoro modified nucleoside
  modified_base order(1,3..10,12..15,17..19,21,27,31..32): mod_base = OTHER; note = 2-Prime-O-Methyl modified nucleoside
  modified_base order(1^2,31^32): mod_base = OTHER; note = (1,3-dimethylimidazolidin-2-ylidene) Phosphoramidate linkage
  modified_base order(2..26,27..31): mod_base = OTHER; note = Phosphorothioate linkage
  modified_base 26^27: mod_base = OTHER; note = Methylphosphonate linkage
  misc_feature 1..32: note = RM110063

SEQ ID NO: 272 - DNA, 32 bp, synthetic construct; identical to SEQ ID NO: 134
  source 1..32: mol_type = other DNA
  misc_feature 7..8: note = DNA
  misc_feature order(1..6,9..32): note = RNA
  modified_base 6: mod_base = OTHER; note = 2-Prime-O-Methoxyethyl modified nucleoside
  modified_base 7: mod_base = OTHER; note = DNA nucleotide carrying a 6-amino-5-nitro-3-yl-2(1H)-pyridone nucleobase
  modified_base order(4..5,10..12,14,18,23,32): mod_base = OTHER; note = 2-Prime-Fluoro modified nucleoside
  modified_base order(1..3,9,13,15..17,19..22,24..31): mod_base = OTHER; note = 2-Prime-O-Methyl modified nucleoside
  modified_base order(1^2,31^32): mod_base = OTHER; note = (1,3-dimethylimidazolidin-2-ylidene) Phosphoramidate linkage
  modified_base order(2..8,9..31): mod_base = OTHER; note = Phosphorothioate linkage
  modified_base 8^9: mod_base = OTHER; note = Methylphosphonate linkage
  misc_feature 1..32: note = RM110064

SEQ ID NO: 273 - DNA, 23 bp, synthetic construct
  source 1..23: mol_type = other DNA
  misc_feature 18..19: note = DNA
  misc_feature order(1..17,20..23): note = RNA
  modified_base 17: mod_base = OTHER; note = 2-Prime-O-Methoxyethyl modified nucleoside
  modified_base 18: mod_base = OTHER; note = DNA nucleotide carrying a 6-amino-5-nitro-3-yl-2(1H)-pyridone nucleobase
  modified_base order(13,15..16,21..23): mod_base = OTHER; note = 2-Prime-Fluoro modified nucleoside
  modified_base order(1..12,14,20): mod_base = OTHER; note = 2-Prime-O-Methyl modified nucleoside
  modified_base order(1^2,22^23): mod_base = OTHER; note = (1,3-dimethylimidazolidin-2-ylidene) Phosphoramidate linkage
  modified_base order(2..19,20..22): mod_base = OTHER; note = Phosphorothioate linkage
  modified_base 19^20: mod_base = OTHER; note = Methylphosphonate linkage
  misc_feature 1..23: note = RM110065
ggtcaaacctctgaggantgggt

SEQ ID NO: 274 - DNA, 23 bp, synthetic construct
  source 1..23: mol_type = other DNA
  misc_feature 15..16: note = DNA
  misc_feature order(1..14,17..23): note = RNA
  modified_base 14: mod_base = OTHER; note = 2-Prime-O-Methoxyethyl modified nucleoside
  modified_base 15: mod_base = OTHER; note = DNA nucleotide carrying a 6-amino-5-nitro-3-yl-2(1H)-pyridone nucleobase
  modified_base order(10,12..13,18..20): mod_base = OTHER; note = 2-Prime-Fluoro modified nucleoside
  modified_base order(1..9,11,17,21..23): mod_base = OTHER; note = 2-Prime-O-Methyl modified nucleoside
  modified_base order(1^2,22^23): mod_base = OTHER; note = (1,3-dimethylimidazolidin-2-ylidene) Phosphoramidate linkage
  modified_base order(2..16,17..22): mod_base = OTHER; note = Phosphorothioate linkage
  modified_base 16^17: mod_base = OTHER; note = Methylphosphonate linkage
  misc_feature 1..23: note = RM110066
caaacctctgaggantgggttca

SEQ ID NO: 275 - DNA, 23 bp, synthetic construct
  source 1..23: mol_type = other DNA
  misc_feature 12..13: note = DNA
  misc_feature order(1..11,14..23): note = RNA
  modified_base 11: mod_base = OTHER; note = 2-Prime-O-Methoxyethyl modified nucleoside
  modified_base 12: mod_base = OTHER; note = DNA nucleotide carrying a 6-amino-5-nitro-3-yl-2(1H)-pyridone nucleobase
  modified_base order(7,9..10,15..17): mod_base = OTHER; note = 2-Prime-Fluoro modified nucleoside
  modified_base order(1..6,8,14,18..23): mod_base = OTHER; note = 2-Prime-O-Methyl modified nucleoside
  modified_base order(1^2,22^23): mod_base = OTHER; note = (1,3-dimethylimidazolidin-2-ylidene) Phosphoramidate linkage
  modified_base order(2..13,14..22): mod_base = OTHER; note = Phosphorothioate linkage
  modified_base 13^14: mod_base = OTHER; note = Methylphosphonate linkage
  misc_feature 1..23: note = RM110067
acctctgaggantgggttcattt

SEQ ID NO: 276 - DNA, 23 bp, synthetic construct
  source 1..23: mol_type = other DNA
  misc_feature 9..10: note = DNA
  misc_feature order(1..8,11..23): note = RNA
  modified_base 8: mod_base = OTHER; note = 2-Prime-O-Methoxyethyl modified nucleoside
  modified_base 9: mod_base = OTHER; note = DNA nucleotide carrying a 6-amino-5-nitro-3-yl-2(1H)-pyridone nucleobase
  modified_base order(4,6..7,12..14): mod_base = OTHER; note = 2-Prime-Fluoro modified nucleoside
  modified_base order(1..3,5,11,15..23): mod_base = OTHER; note = 2-Prime-O-Methyl modified nucleoside
  modified_base order(1^2,22^23): mod_base = OTHER; note = (1,3-dimethylimidazolidin-2-ylidene) Phosphoramidate linkage
  modified_base order(2..10,11..22): mod_base = OTHER; note = Phosphorothioate linkage
  modified_base 10^11: mod_base = OTHER; note = Methylphosphonate linkage
  misc_feature 1..23: note = RM110068
tctgaggantgggttcatttttc

SEQ ID NO: 277 - DNA, 23 bp, synthetic construct
  source 1..23: mol_type = other DNA
  misc_feature 6..7: note = DNA
  misc_feature order(1..5,8..23): note = RNA
  modified_base 5: mod_base = OTHER; note = 2-Prime-O-Methoxyethyl modified nucleoside
  modified_base 6: mod_base = OTHER; note = DNA nucleotide carrying a 6-amino-5-nitro-3-yl-2(1H)-pyridone nucleobase
  modified_base order(1,3..4,9..11): mod_base = OTHER; note = 2-Prime-Fluoro modified nucleoside
  modified_base order(2,8,12..23): mod_base = OTHER; note = 2-Prime-O-Methyl modified nucleoside
  modified_base order(1^2,22^23): mod_base = OTHER; note = (1,3-dimethylimidazolidin-2-ylidene) Phosphoramidate linkage
  modified_base order(2..7,8..22): mod_base = OTHER; note = Phosphorothioate linkage
  modified_base 7^8: mod_base = OTHER; note = Methylphosphonate linkage
  misc_feature 1..23: note = RM110069
gaggantgggttcatttttcttg

SEQ ID NO: 278 - DNA, 32 bp, synthetic construct; identical to SEQ ID NO: 128
  source 1..32: mol_type = other DNA
  misc_feature 25..26: note = DNA
  misc_feature order(1..24,27..32): note = RNA
  modified_base 24: mod_base = OTHER; note = 2-Prime-O-Methoxyethyl modified nucleoside
  modified_base 25: mod_base = OTHER; note = DNA nucleotide carrying a 6-amino-5-nitro-3-yl-2(1H)-pyridone nucleobase
  modified_base order(20,22..23,28..30): mod_base = OTHER; note = 2-Prime-Fluoro modified nucleoside
  modified_base order(1..19,21,27,31..32): mod_base = OTHER; note = 2-Prime-O-Methyl modified nucleoside
  modified_base order(1^2,31^32): mod_base = OTHER; note = (1,3-dimethylimidazolidin-2-ylidene) Phosphoramidate linkage
  modified_base order(2..26,27..31): mod_base = OTHER; note = Phosphorothioate linkage
  modified_base 26^27: mod_base = OTHER; note = Methylphosphonate linkage
  misc_feature 1..32: note = RM110070

SEQ ID NO: 279 - DNA, 32 bp, synthetic construct; identical to SEQ ID NO: 129
  source 1..32: mol_type = other DNA
  misc_feature 22..23: note = DNA
  misc_feature order(1..21,24..32): note = RNA
  modified_base 21: mod_base = OTHER; note = 2-Prime-O-Methoxyethyl modified nucleoside
  modified_base 22: mod_base = OTHER; note = DNA nucleotide carrying a 6-amino-5-nitro-3-yl-2(1H)-pyridone nucleobase
  modified_base order(17,19..20,25..27): mod_base = OTHER; note = 2-Prime-Fluoro modified nucleoside
  modified_base order(1..16,18,24,28..32): mod_base = OTHER; note = 2-Prime-O-Methyl modified nucleoside
  modified_base order(1^2,31^32): mod_base = OTHER; note = (1,3-dimethylimidazolidin-2-ylidene) Phosphoramidate linkage
  modified_base order(2..23,24..31): mod_base = OTHER; note = Phosphorothioate linkage
  modified_base 23^24: mod_base = OTHER; note = Methylphosphonate linkage
  misc_feature 1..32: note = RM110071

SEQ ID NO: 280 - DNA, 32 bp, synthetic construct; identical to SEQ ID NO: 19
  source 1..32: mol_type = other DNA
  misc_feature 19..20: note = DNA
  misc_feature order(1..18,21..32): note = RNA
  modified_base 18: mod_base = OTHER; note = 2-Prime-O-Methoxyethyl modified nucleoside
  modified_base 19: mod_base = OTHER; note = DNA nucleotide carrying a 6-amino-5-nitro-3-yl-2(1H)-pyridone nucleobase
  modified_base order(14,16..17,22..24): mod_base = OTHER; note = 2-Prime-Fluoro modified nucleoside
  modified_base order(1..13,15,21,25..32): mod_base = OTHER; note = 2-Prime-O-Methyl modified nucleoside
  modified_base order(1^2,31^32): mod_base = OTHER; note = (1,3-dimethylimidazolidin-2-ylidene) Phosphoramidate linkage
  modified_base order(2..20,21..31): mod_base = OTHER; note = Phosphorothioate linkage
  modified_base 20^21: mod_base = OTHER; note = Methylphosphonate linkage
  misc_feature 1..32: note = RM110072

SEQ ID NO: 281 - DNA, 32 bp, synthetic construct; identical to SEQ ID NO: 131
  source 1..32: mol_type = other DNA
  misc_feature 16..17: note = DNA
  misc_feature order(1..15,18..32): note = RNA
  modified_base 15: mod_base = OTHER; note = 2-Prime-O-Methoxyethyl modified nucleoside
  modified_base 16: mod_base = OTHER; note = DNA nucleotide carrying a 6-amino-5-nitro-3-yl-2(1H)-pyridone nucleobase
  modified_base order(11,13..14,19..21): mod_base = OTHER; note = 2-Prime-Fluoro modified nucleoside
  modified_base order(1..10,12,18,22..32): mod_base = OTHER; note = 2-Prime-O-Methyl modified nucleoside
  modified_base order(1^2,31^32): mod_base = OTHER; note = (1,3-dimethylimidazolidin-2-ylidene) Phosphoramidate linkage
  modified_base order(2..17,18..31): mod_base = OTHER; note = Phosphorothioate linkage
  modified_base 17^18: mod_base = OTHER; note = Methylphosphonate linkage
  misc_feature 1..32: note = RM110073

SEQ ID NO: 282 - DNA, 32 bp, synthetic construct; identical to SEQ ID NO: 132
  source 1..32: mol_type = other DNA
  misc_feature 13..14: note = DNA
  misc_feature order(1..12,15..32): note = RNA
  modified_base 12: mod_base = OTHER; note = 2-Prime-O-Methoxyethyl modified nucleoside
  modified_base 13: mod_base = OTHER; note = DNA nucleotide carrying a 6-amino-5-nitro-3-yl-2(1H)-pyridone nucleobase
  modified_base order(8,10..11,16..18): mod_base = OTHER; note = 2-Prime-Fluoro modified nucleoside
  modified_base order(1..7,9,15,19..32): mod_base = OTHER; note = 2-Prime-O-Methyl modified nucleoside
  modified_base order(1^2,31^32): mod_base = OTHER; note = (1,3-dimethylimidazolidin-2-ylidene) Phosphoramidate linkage
  modified_base order(2..14,15..31): mod_base = OTHER; note = Phosphorothioate linkage
  modified_base 14^15: mod_base = OTHER; note = Methylphosphonate linkage
  misc_feature 1..32: note = RM110074

SEQ ID NO: 283 - DNA, 32 bp, synthetic construct; identical to SEQ ID NO: 133
  source 1..32: mol_type = other DNA
  misc_feature 10..11: note = DNA
  misc_feature order(1..9,12..32): note = RNA
  modified_base 9: mod_base = OTHER; note = 2-Prime-O-Methoxyethyl modified nucleoside
  modified_base 10: mod_base = OTHER; note = DNA nucleotide carrying a 6-amino-5-nitro-3-yl-2(1H)-pyridone nucleobase
  modified_base order(5,7..8,13..15): mod_base = OTHER; note = 2-Prime-Fluoro modified nucleoside
  modified_base order(1..4,6,12,16..32): mod_base = OTHER; note = 2-Prime-O-Methyl modified nucleoside
  modified_base order(1^2,31^32): mod_base = OTHER; note = (1,3-dimethylimidazolidin-2-ylidene) Phosphoramidate linkage
  modified_base order(2..11,12..31): mod_base = OTHER; note = Phosphorothioate linkage
  modified_base 11^12: mod_base = OTHER; note = Methylphosphonate linkage
  misc_feature 1..32: note = RM110075

SEQ ID NO: 284 - DNA, 32 bp, synthetic construct; identical to SEQ ID NO: 134
  source 1..32: mol_type = other DNA
  misc_feature 7..8: note = DNA
  misc_feature order(1..6,9..32): note = RNA
  modified_base 6: mod_base = OTHER; note = 2-Prime-O-Methoxyethyl modified nucleoside
  modified_base 7: mod_base = OTHER; note = DNA nucleotide carrying a 6-amino-5-nitro-3-yl-2(1H)-pyridone nucleobase
  modified_base order(2,4..5,10..12): mod_base = OTHER; note = 2-Prime-Fluoro modified nucleoside
  modified_base order(1,3,9,13..32): mod_base = OTHER; note = 2-Prime-O-Methyl modified nucleoside
  modified_base order(1^2,31^32): mod_base = OTHER; note = (1,3-dimethylimidazolidin-2-ylidene) Phosphoramidate linkage
  modified_base order(2..8,9..31): mod_base = OTHER; note = Phosphorothioate linkage
  modified_base 8^9: mod_base = OTHER; note = Methylphosphonate linkage
  misc_feature 1..32: note = RM110076

SEQ ID NO: 285 - DNA, 23 bp, synthetic construct
  source 1..23: mol_type = other DNA
  misc_feature 15..16: note = DNA
  misc_feature order(1..14,17..23): note = RNA
  modified_base 14: mod_base = OTHER; note = 2-Prime-O-Methoxyethyl modified nucleoside
  modified_base 15: mod_base = OTHER; note = DNA nucleotide carrying a 6-amino-5-nitro-3-yl-2(1H)-pyridone nucleobase
  modified_base order(12..13,18..20,22): mod_base = OTHER; note = 2-Prime-Fluoro modified nucleoside
  modified_base order(1..11,17,21,23): mod_base = OTHER; note = 2-Prime-O-Methyl modified nucleoside
  modified_base order(1^2,22^23): mod_base = OTHER; note = (1,3-dimethylimidazolidin-2-ylidene) Phosphoramidate linkage
  modified_base order(2..16,17..22): mod_base = OTHER; note = Phosphorothioate linkage
  modified_base 16^17: mod_base = OTHER; note = Methylphosphonate linkage
  misc_feature 1..23: note = RM110077
caaacctctgaggantgggttca

SEQ ID NO: 286 - DNA, 23 bp, synthetic construct
  source 1..23: mol_type = other DNA
  misc_feature 12..13: note = DNA
  misc_feature order(1..11,14..23): note = RNA
  modified_base 11: mod_base = OTHER; note = 2-Prime-O-Methoxyethyl modified nucleoside
  modified_base 12: mod_base = OTHER; note = DNA nucleotide carrying a 6-amino-5-nitro-3-yl-2(1H)-pyridone nucleobase
  modified_base order(9..10,15..17,19): mod_base = OTHER; note = 2-Prime-Fluoro modified nucleoside
  modified_base order(1..8,14,18,20..23): mod_base = OTHER; note = 2-Prime-O-Methyl modified nucleoside
  modified_base order(1^2,22^23): mod_base = OTHER; note = (1,3-dimethylimidazolidin-2-ylidene) Phosphoramidate linkage
  modified_base order(2..13,14..22): mod_base = OTHER; note = Phosphorothioate linkage
  modified_base 13^14: mod_base = OTHER; note = Methylphosphonate linkage
  misc_feature 1..23: note = RM110078
acctctgaggantgggttcattt

SEQ ID NO: 287 - DNA, 23 bp, synthetic construct
  source 1..23: mol_type = other DNA
  misc_feature 9..10: note = DNA
  misc_feature order(1..8,11..23): note = RNA
  modified_base 8: mod_base = OTHER; note = 2-Prime-O-Methoxyethyl modified nucleoside
  modified_base 9: mod_base = OTHER; note = DNA nucleotide carrying a 6-amino-5-nitro-3-yl-2(1H)-pyridone nucleobase
  modified_base order(6..7,12..14,16): mod_base = OTHER; note = 2-Prime-Fluoro modified nucleoside
  modified_base order(1..5,11,15,17..23): mod_base = OTHER; note = 2-Prime-O-Methyl modified nucleoside
  modified_base order(1^2,22^23): mod_base = OTHER; note = (1,3-dimethylimidazolidin-2-ylidene) Phosphoramidate linkage
  modified_base order(2..10,11..22): mod_base = OTHER; note = Phosphorothioate linkage
  modified_base 10^11: mod_base = OTHER; note = Methylphosphonate linkage
  misc_feature 1..23: note = RM110079
tctgaggantgggttcatttttc

SEQ ID NO: 288 - DNA, 23 bp, synthetic construct
  source 1..23: mol_type = other DNA
  misc_feature 6..7: note = DNA
  misc_feature order(1..5,8..23): note = RNA
  modified_base 5: mod_base = OTHER; note = 2-Prime-O-Methoxyethyl modified nucleoside
  modified_base 6: mod_base = OTHER; note = DNA nucleotide carrying a 6-amino-5-nitro-3-yl-2(1H)-pyridone nucleobase
  modified_base order(3..4,9..11,13): mod_base = OTHER; note = 2-Prime-Fluoro modified nucleoside
  modified_base order(1..2,8,12,14..23): mod_base = OTHER; note = 2-Prime-O-Methyl modified nucleoside
  modified_base order(1^2,22^23): mod_base = OTHER; note = (1,3-dimethylimidazolidin-2-ylidene) Phosphoramidate linkage
  modified_base order(2..7,8..22): mod_base = OTHER; note = Phosphorothioate linkage
  modified_base 7^8: mod_base = OTHER; note = Methylphosphonate linkage
  misc_feature 1..23: note = RM110080
gaggantgggttcatttttcttg

SEQ ID NO: 289 - DNA, 32 bp, synthetic construct; identical to SEQ ID NO: 128
  source 1..32: mol_type = other DNA
  misc_feature 25..26: note = DNA
  misc_feature order(1..24,27..32): note = RNA
  modified_base 24: mod_base = OTHER; note = 2-Prime-O-Methoxyethyl modified nucleoside
  modified_base 25: mod_base = OTHER; note = DNA nucleotide carrying a 6-amino-5-nitro-3-yl-2(1H)-pyridone nucleobase
  modified_base order(22..23,28..30,32): mod_base = OTHER; note = 2-Prime-Fluoro modified nucleoside
  modified_base order(1..21,27,31): mod_base = OTHER; note = 2-Prime-O-Methyl modified nucleoside
  modified_base order(1^2,31^32): mod_base = OTHER; note = (1,3-dimethylimidazolidin-2-ylidene) Phosphoramidate linkage
  modified_base order(2..26,27..31): mod_base = OTHER; note = Phosphorothioate linkage
  modified_base 26^27: mod_base = OTHER; note = Methylphosphonate linkage
  misc_feature 1..32: note = RM110081

SEQ ID NO: 290 - DNA, 32 bp, synthetic construct; identical to SEQ ID NO: 129
  source 1..32: mol_type = other DNA
  misc_feature 22..23: note = DNA
  misc_feature order(1..21,24..32): note = RNA
  modified_base 21: mod_base = OTHER; note = 2-Prime-O-Methoxyethyl modified nucleoside
  modified_base 22: mod_base = OTHER; note = DNA nucleotide carrying a 6-amino-5-nitro-3-yl-2(1H)-pyridone nucleobase
  modified_base order(19..20,25..27,29): mod_base = OTHER; note = 2-Prime-Fluoro modified nucleoside
  modified_base order(1..18,24,28,30..32): mod_base = OTHER; note = 2-Prime-O-Methyl modified nucleoside
  modified_base order(1^2,31^32): mod_base = OTHER; note = (1,3-dimethylimidazolidin-2-ylidene) Phosphoramidate linkage
  modified_base order(2..23,24..31): mod_base = OTHER; note = Phosphorothioate linkage
  modified_base 23^24: mod_base = OTHER; note = Methylphosphonate linkage
  misc_feature 1..32: note = RM110082

SEQ ID NO: 291 - DNA, 32 bp, synthetic construct; identical to SEQ ID NO: 19
  source 1..32: mol_type = other DNA
  misc_feature 19..20: note = DNA
  misc_feature order(1..18,21..32): note = RNA
  modified_base 18: mod_base = OTHER; note = 2-Prime-O-Methoxyethyl modified nucleoside
  modified_base 19: mod_base = OTHER; note = DNA nucleotide carrying a 6-amino-5-nitro-3-yl-2(1H)-pyridone nucleobase
  modified_base order(16..17,22..24,26): mod_base = OTHER; note = 2-Prime-Fluoro modified nucleoside
  modified_base order(1..15,21,25,27..32): mod_base = OTHER; note = 2-Prime-O-Methyl modified nucleoside
  modified_base order(1^2,31^32): mod_base = OTHER; note = (1,3-dimethylimidazolidin-2-ylidene) Phosphoramidate linkage
  modified_base order(2..20,21..31): mod_base = OTHER; note = Phosphorothioate linkage
  modified_base 20^21: mod_base = OTHER; note = Methylphosphonate linkage
  misc_feature 1..32: note = RM110083

SEQ ID NO: 292 - DNA, 32 bp, synthetic construct; identical to SEQ ID NO: 131
  source 1..32: mol_type = other DNA
  misc_feature 16..17: note = DNA
  misc_feature order(1..15,18..32): note = RNA
  modified_base 15: mod_base = OTHER; note = 2-Prime-O-Methoxyethyl modified nucleoside
  modified_base 16: mod_base = OTHER; note = DNA nucleotide carrying a 6-amino-5-nitro-3-yl-2(1H)-pyridone nucleobase
  modified_base order(13..14,19..21,23): mod_base = OTHER; note = 2-Prime-Fluoro modified nucleoside
  modified_base order(1..12,18,22,24..32): mod_base = OTHER; note = 2-Prime-O-Methyl modified nucleoside
  modified_base order(1^2,31^32): mod_base = OTHER; note = (1,3-dimethylimidazolidin-2-ylidene) Phosphoramidate linkage
  modified_base order(2..17,18..31): mod_base = OTHER; note = Phosphorothioate linkage
  modified_base 17^18: mod_base = OTHER; note = Methylphosphonate linkage
  misc_feature 1..32: note = RM110084

SEQ ID NO: 293 - DNA, 32 bp, synthetic construct; identical to SEQ ID NO: 132
  source 1..32: mol_type = other DNA
  misc_feature 13..14: note = DNA
  misc_feature order(1..12,15..32): note = RNA
  modified_base 12: mod_base = OTHER; note = 2-Prime-O-Methoxyethyl modified nucleoside
  modified_base 13: mod_base = OTHER; note = DNA nucleotide carrying a 6-amino-5-nitro-3-yl-2(1H)-pyridone nucleobase
  modified_base order(10..11,16..18,20): mod_base = OTHER; note = 2-Prime-Fluoro modified nucleoside
  modified_base order(1..9,15,19,21..32): mod_base = OTHER; note = 2-Prime-O-Methyl modified nucleoside
  modified_base order(1^2,31^32): mod_base = OTHER; note = (1,3-dimethylimidazolidin-2-ylidene) Phosphoramidate linkage
  modified_base order(2..14,15..31): mod_base = OTHER; note = Phosphorothioate linkage
  modified_base 14^15: mod_base = OTHER; note = Methylphosphonate linkage
  misc_feature 1..32: note = RM110085

SEQ ID NO: 294 - DNA, 32 bp, synthetic construct; identical to SEQ ID NO: 133
  source 1..32: mol_type = other DNA
  misc_feature 10..11: note = DNA
  misc_feature order(1..9,12..32): note = RNA
  modified_base 9: mod_base = OTHER; note = 2-Prime-O-Methoxyethyl modified nucleoside
  modified_base 10: mod_base = OTHER; note = DNA nucleotide carrying a 6-amino-5-nitro-3-yl-2(1H)-pyridone nucleobase
  modified_base order(7..8,13..15,17): mod_base = OTHER; note = 2-Prime-Fluoro modified nucleoside
  modified_base order(1..6,12,16,18..32): mod_base = OTHER; note = 2-Prime-O-Methyl modified nucleoside
  modified_base order(1^2,31^32): mod_base = OTHER; note = (1,3-dimethylimidazolidin-2-ylidene) Phosphoramidate linkage
  modified_base order(2..11,12..31): mod_base = OTHER; note = Phosphorothioate linkage
  modified_base 11^12: mod_base = OTHER; note = Methylphosphonate linkage
  misc_feature 1..32: note = RM110086

SEQ ID NO: 295 - DNA, 32 bp, synthetic construct; identical to SEQ ID NO: 134
  source 1..32: mol_type = other DNA
  misc_feature 7..8: note = DNA
  misc_feature order(1..6,9..32): note = RNA
  modified_base 6: mod_base = OTHER; note = 2-Prime-O-Methoxyethyl modified nucleoside
  modified_base 7: mod_base = OTHER; note = DNA nucleotide carrying a 6-amino-5-nitro-3-yl-2(1H)-pyridone nucleobase
  modified_base order(4..5,10..12,14): mod_base = OTHER; note = 2-Prime-Fluoro modified nucleoside
  modified_base order(1..3,9,13,15..32): mod_base = OTHER; note = 2-Prime-O-Methyl modified nucleoside
  modified_base order(1^2,31^32): mod_base = OTHER; note = (1,3-dimethylimidazolidin-2-ylidene) Phosphoramidate linkage
  modified_base order(2..8,9..31): mod_base = OTHER; note = Phosphorothioate linkage
  modified_base 8^9: mod_base = OTHER; note = Methylphosphonate linkage
  misc_feature 1..32: note = RM110087

SEQ ID NO: 296 - DNA, 32 bp, synthetic construct; identical to SEQ ID NO: 127
  source 1..32: mol_type = other DNA
  misc_feature 28..29: note = DNA
  misc_feature order(1..27,30..32): note = RNA
  modified_base 27: mod_base = OTHER; note = 2-Prime-O-Methoxyethyl modified nucleoside
  modified_base 28: mod_base = OTHER; note = DNA nucleotide carrying a 6-amino-5-nitro-3-yl-2(1H)-pyridone nucleobase
  modified_base order(25..26,31): mod_base = OTHER; note = 2-Prime-Fluoro modified nucleoside
  modified_base order(1..24,30,32): mod_base = OTHER; note = 2-Prime-O-Methyl modified nucleoside
  modified_base order(1^2,31^32): mod_base = OTHER; note = (1,3-dimethylimidazolidin-2-ylidene) Phosphoramidate linkage
  modified_base order(2..29,30^31): mod_base = OTHER; note = Phosphorothioate linkage
  modified_base 29^30: mod_base = OTHER; note = Methylphosphonate linkage
  misc_feature 1..32: note = RM110088

SEQ ID NO: 297 - DNA, 32 bp, synthetic construct; identical to SEQ ID NO: 128
  source 1..32: mol_type = other DNA
  misc_feature 25..26: note = DNA
  misc_feature order(1..24,27..32): note = RNA
  modified_base 24: mod_base = OTHER; note = 2-Prime-O-Methoxyethyl modified nucleoside
  modified_base 25: mod_base = OTHER; note = DNA nucleotide carrying a 6-amino-5-nitro-3-yl-2(1H)-pyridone nucleobase
  modified_base order(22..23,28): mod_base = OTHER; note = 2-Prime-Fluoro modified nucleoside
  modified_base order(1..21,27,29..32): mod_base = OTHER; note = 2-Prime-O-Methyl modified nucleoside
  modified_base order(1^2,31^32): mod_base = OTHER; note = (1,3-dimethylimidazolidin-2-ylidene) Phosphoramidate linkage
  modified_base order(2..26,27..31): mod_base = OTHER; note = Phosphorothioate linkage
  modified_base 26^27: mod_base = OTHER; note = Methylphosphonate linkage
  misc_feature 1..32: note = RM110089

SEQ ID NO: 298 - DNA, 32 bp, synthetic construct; identical to SEQ ID NO: 129
  source 1..32: mol_type = other DNA
  misc_feature 22..23: note = DNA
  misc_feature order(1..21,24..32): note = RNA
  modified_base 21: mod_base = OTHER; note = 2-Prime-O-Methoxyethyl modified nucleoside
  modified_base 22: mod_base = OTHER; note = DNA nucleotide carrying a 6-amino-5-nitro-3-yl-2(1H)-pyridone nucleobase
  modified_base order(19..20,25): mod_base = OTHER; note = 2-Prime-Fluoro modified nucleoside
  modified_base order(1..18,24,26..32): mod_base = OTHER; note = 2-Prime-O-Methyl modified nucleoside
  modified_base order(1^2,31^32): mod_base = OTHER; note = (1,3-dimethylimidazolidin-2-ylidene) Phosphoramidate linkage
  modified_base order(2..23,24..31): mod_base = OTHER; note = Phosphorothioate linkage
  modified_base 23^24: mod_base = OTHER; note = Methylphosphonate linkage
  misc_feature 1..32: note = RM110090

SEQ ID NO: 299 - DNA, 32 bp, synthetic construct; identical to SEQ ID NO: 19
  source 1..32: mol_type = other DNA
  misc_feature 19..20: note = DNA
  misc_feature order(1..18,21..32): note = RNA
  modified_base 18: mod_base = OTHER; note = 2-Prime-O-Methoxyethyl modified nucleoside
  modified_base 19: mod_base = OTHER; note = DNA nucleotide carrying a 6-amino-5-nitro-3-yl-2(1H)-pyridone nucleobase
  modified_base order(16..17,22): mod_base = OTHER; note = 2-Prime-Fluoro modified nucleoside
  modified_base order(1..15,21,23..32): mod_base = OTHER; note = 2-Prime-O-Methyl modified nucleoside
  modified_base order(1^2,31^32): mod_base = OTHER; note = (1,3-dimethylimidazolidin-2-ylidene) Phosphoramidate linkage
  modified_base order(2..20,21..31): mod_base = OTHER; note = Phosphorothioate linkage
  modified_base 20^21: mod_base = OTHER; note = Methylphosphonate linkage
  misc_feature 1..32: note = RM110091

SEQ ID NO: 300 - DNA, 32 bp, synthetic construct; identical to SEQ ID NO: 131
  source 1..32: mol_type = other DNA
  misc_feature 16..17: note = DNA
  misc_feature order(1..15,18..32): note = RNA
  modified_base 15: mod_base = OTHER; note = 2-Prime-O-Methoxyethyl modified nucleoside
  modified_base 16: mod_base = OTHER; note = DNA nucleotide carrying a 6-amino-5-nitro-3-yl-2(1H)-pyridone nucleobase
  modified_base order(13..14,19): mod_base = OTHER; note = 2-Prime-Fluoro modified nucleoside
  modified_base order(1..12,18,20..32): mod_base = OTHER; note = 2-Prime-O-Methyl modified nucleoside
  modified_base order(1^2,31^32): mod_base = OTHER; note = (1,3-dimethylimidazolidin-2-ylidene) Phosphoramidate linkage
  modified_base order(2..17,18..31): mod_base = OTHER; note = Phosphorothioate linkage
  modified_base 17^18: mod_base = OTHER; note = Methylphosphonate linkage
  misc_feature 1..32: note = RM110092

SEQ ID NO: 301 - DNA, 32 bp, synthetic construct; identical to SEQ ID NO: 132
  source 1..32: mol_type = other DNA
  misc_feature 13..14: note = DNA
  misc_feature order(1..12,15..32): note = RNA
  modified_base 12: mod_base = OTHER; note = 2-Prime-O-Methoxyethyl modified nucleoside
  modified_base 13: mod_base = OTHER; note = DNA nucleotide carrying a 6-amino-5-nitro-3-yl-2(1H)-pyridone nucleobase
  modified_base order(10..11,16): mod_base = OTHER; note = 2-Prime-Fluoro modified nucleoside
  modified_base order(1..9,15,17..32): mod_base = OTHER; note = 2-Prime-O-Methyl modified nucleoside
  modified_base order(1^2,31^32): mod_base = OTHER; note = (1,3-dimethylimidazolidin-2-ylidene) Phosphoramidate linkage
  modified_base order(2..14,15..31): mod_base = OTHER; note = Phosphorothioate linkage
  modified_base 14^15: mod_base = OTHER; note = Methylphosphonate linkage
  misc_feature 1..32: note = RM110093

SEQ ID NO: 302 - DNA, 32 bp, synthetic construct; identical to SEQ ID NO: 133
  source 1..32: mol_type = other DNA
  misc_feature 10..11: note = DNA
  misc_feature order(1..9,12..32): note = RNA
  modified_base 9: mod_base = OTHER; note = 2-Prime-O-Methoxyethyl modified nucleoside
  modified_base 10: mod_base = OTHER; note = DNA nucleotide carrying a 6-amino-5-nitro-3-yl-2(1H)-pyridone nucleobase
  modified_base order(7..8,13): mod_base = OTHER; note = 2-Prime-Fluoro modified nucleoside
  modified_base order(1..6,12,14..32): mod_base = OTHER; note = 2-Prime-O-Methyl modified nucleoside
  modified_base order(1^2,31^32): mod_base = OTHER; note = (1,3-dimethylimidazolidin-2-ylidene) Phosphoramidate linkage
  modified_base order(2..11,12..31): mod_base = OTHER; note = Phosphorothioate linkage
  modified_base 11^12: mod_base = OTHER; note = Methylphosphonate linkage
  misc_feature 1..32: note = RM110094

SEQ ID NO: 303 - DNA, 32 bp, synthetic construct; identical to SEQ ID NO: 134
  source 1..32: mol_type = other DNA
  misc_feature 7..8: note = DNA
  misc_feature order(1..6,9..32): note = RNA
  modified_base 6: mod_base = OTHER; note = 2-Prime-O-Methoxyethyl modified nucleoside
  modified_base 7: mod_base = OTHER; note = DNA nucleotide carrying a 6-amino-5-nitro-3-yl-2(1H)-pyridone nucleobase
  modified_base order(4..5,10): mod_base = OTHER; note = 2-Prime-Fluoro modified nucleoside
  modified_base order(1..3,9,11..32): mod_base = OTHER; note = 2-Prime-O-Methyl modified nucleoside
  modified_base order(1^2,31^32): mod_base = OTHER; note = (1,3-dimethylimidazolidin-2-ylidene) Phosphoramidate linkage
  modified_base order(2..8,9..31): mod_base = OTHER; note = Phosphorothioate linkage
  modified_base 8^9: mod_base = OTHER; note = Methylphosphonate linkage
  misc_feature 1..32: note = RM110095

SEQ ID NO: 304 - DNA, 32 bp, synthetic construct; identical to SEQ ID NO: 132
  source 1..32: mol_type = other DNA
  misc_feature 13..14: note = DNA
  misc_feature order(1..12,15..32): note = RNA
  modified_base 12: mod_base = OTHER; note = 2-Prime-O-Methoxyethyl modified nucleoside
  modified_base 13: mod_base = OTHER; note = DNA nucleotide carrying a 6-amino-5-nitro-3-yl-2(1H)-pyridone nucleobase
  modified_base order(7..9,16,29,32): mod_base = OTHER; note = 2-Prime-Fluoro modified nucleoside
  modified_base order(1..6,10..11,15,17..28,30..31): mod_base = OTHER; note = 2-Prime-O-Methyl modified nucleoside
  modified_base order(1^2,31^32): mod_base = OTHER; note = (1,3-dimethylimidazolidin-2-ylidene) Phosphoramidate linkage
  modified_base order(2..14,15..31): mod_base = OTHER; note = Phosphorothioate linkage
  modified_base 14^15: mod_base = OTHER; note = Methylphosphonate linkage
  misc_feature 1..32: note = RM110096

SEQ ID NO: 305 - DNA, 32 bp, synthetic construct; identical to SEQ ID NO: 133
  source 1..32: mol_type = other DNA
  misc_feature 10..11: note = DNA
  misc_feature order(1..9,12..32): note = RNA
  modified_base 9: mod_base = OTHER; note = 2-Prime-O-Methoxyethyl modified nucleoside
  modified_base 10: mod_base = OTHER; note = DNA nucleotide carrying a 6-amino-5-nitro-3-yl-2(1H)-pyridone nucleobase
  modified_base order(4..6,13,26,29): mod_base = OTHER; note = 2-Prime-Fluoro modified nucleoside
  modified_base order(1..3,7..8,12,14..25,27..28,30..32): mod_base = OTHER; note = 2-Prime-O-Methyl modified nucleoside
  modified_base order(1^2,31^32): mod_base = OTHER; note = (1,3-dimethylimidazolidin-2-ylidene) Phosphoramidate linkage
  modified_base order(2..11,12..31): mod_base = OTHER; note = Phosphorothioate linkage
  modified_base 11^12: mod_base = OTHER; note = Methylphosphonate linkage
  misc_feature 1..32: note = RM110097

SEQ ID NO: 306 - DNA, 32 bp, synthetic construct; identical to SEQ ID NO: 134
  source 1..32: mol_type = other DNA
  misc_feature 7..8: note = DNA
  misc_feature order(1..6,9..32): note = RNA
  modified_base 6: mod_base = OTHER; note = 2-Prime-O-Methoxyethyl modified nucleoside
  modified_base 7: mod_base = OTHER; note = DNA nucleotide carrying a 6-amino-5-nitro-3-yl-2(1H)-pyridone nucleobase
  modified_base order(1..3,10,23,26): mod_base = OTHER; note = 2-Prime-Fluoro modified nucleoside
  modified_base order(4..5,9,11..22,24..25,27..32): mod_base = OTHER; note = 2-Prime-O-Methyl modified nucleoside
  modified_base order(1^2,31^32): mod_base = OTHER; note = (1,3-dimethylimidazolidin-2-ylidene) Phosphoramidate linkage
  modified_base order(2..8,9..31): mod_base = OTHER; note = Phosphorothioate linkage
  modified_base 8^9: mod_base = OTHER; note = Methylphosphonate linkage
  misc_feature 1..32: note = RM110098

SEQ ID NO: 307 - DNA, 32 bp, synthetic construct; identical to SEQ ID NO: 129
  source 1..32: mol_type = other DNA
  misc_feature 22..23: note = DNA
  misc_feature order(1..21,24..32): note = RNA
  modified_base 21: mod_base = OTHER; note = 2-Prime-O-Methoxyethyl modified nucleoside
  modified_base 22: mod_base = OTHER; note = DNA nucleotide carrying a 6-amino-5-nitro-3-yl-2(1H)-pyridone nucleobase
  modified_base order(5,8,25,28..30): mod_base = OTHER; note = 2-Prime-Fluoro modified nucleoside
  modified_base order(1..4,6..7,9..20,24,26..27,31..32): mod_base = OTHER; note = 2-Prime-O-Methyl modified nucleoside
  modified_base order(1^2,31^32): mod_base = OTHER; note = (1,3-dimethylimidazolidin-2-ylidene) Phosphoramidate linkage
  modified_base order(2..23,24..31): mod_base = OTHER; note = Phosphorothioate linkage
  modified_base 23^24: mod_base = OTHER; note = Methylphosphonate linkage
  misc_feature 1..32: note = RM110099

SEQ ID NO: 308 - DNA, 32 bp, synthetic construct; identical to SEQ ID NO: 19
  source 1..32: mol_type = other DNA
  misc_feature 19..20: note = DNA
  misc_feature order(1..18,21..32): note = RNA
  modified_base 18: mod_base = OTHER; note = 2-Prime-O-Methoxyethyl modified nucleoside
  modified_base 19: mod_base = OTHER; note = DNA nucleotide carrying a 6-amino-5-nitro-3-yl-2(1H)-pyridone nucleobase
  modified_base order(2,5,22,25..27): mod_base = OTHER; note = 2-Prime-Fluoro modified nucleoside
  modified_base order(1,3..4,6..17,21,23..24,28..32): mod_base = OTHER; note = 2-Prime-O-Methyl modified nucleoside
  modified_base order(1^2,31^32): mod_base = OTHER; note = (1,3-dimethylimidazolidin-2-ylidene) Phosphoramidate linkage
  modified_base order(2..20,21..31): mod_base = OTHER; note = Phosphorothioate linkage
  modified_base 20^21: mod_base = OTHER; note = Methylphosphonate linkage
  misc_feature 1..32: note = RM110100

SEQ ID NO: 309 - DNA, 23 bp, synthetic construct
  source 1..23: mol_type = other DNA
  misc_feature 18..19: note = DNA
  misc_feature order(1..17,20..23): note = RNA
  modified_base 17: mod_base = OTHER; note = 2-Prime-O-Methoxyethyl modified nucleoside
  modified_base 18: mod_base = OTHER; note = DNA nucleotide carrying a 6-amino-5-nitro-3-yl-2(1H)-pyridone nucleobase
  modified_base order(12..14,21): mod_base = OTHER; note = 2-Prime-Fluoro modified nucleoside
  modified_base order(1..11,15..16,20,22..23): mod_base = OTHER; note = 2-Prime-O-Methyl modified nucleoside
  modified_base order(1^2,22^23): mod_base = OTHER; note = (1,3-dimethylimidazolidin-2-ylidene) Phosphoramidate linkage
  modified_base order(2..19,20..22): mod_base = OTHER; note = Phosphorothioate linkage
  modified_base 19^20: mod_base = OTHER; note = Methylphosphonate linkage
  misc_feature 1..23: note = RM110101
ggtcaaacctctgaggantgggt

SEQ ID NO: 310 - DNA, 23 bp, synthetic construct
  source 1..23: mol_type = other DNA
  misc_feature 15..16: note = DNA
  misc_feature order(1..14,17..23): note = RNA
  modified_base 14: mod_base = OTHER; note = 2-Prime-O-Methoxyethyl modified nucleoside
  modified_base 15: mod_base = OTHER; note = DNA nucleotide carrying a 6-amino-5-nitro-3-yl-2(1H)-pyridone nucleobase
  modified_base order(9..11,18): mod_base = OTHER; note = 2-Prime-Fluoro modified nucleoside
  modified_base order(1..8,12..13,17,19..23): mod_base = OTHER; note = 2-Prime-O-Methyl modified nucleoside
  modified_base order(1^2,22^23): mod_base = OTHER; note = (1,3-dimethylimidazolidin-2-ylidene) Phosphoramidate linkage
  modified_base order(2..16,17..22): mod_base = OTHER; note = Phosphorothioate linkage
  modified_base 16^17: mod_base = OTHER; note = Methylphosphonate linkage
  misc_feature 1..23: note = RM110102
caaacctctgaggantgggttca

SEQ ID NO: 311 - DNA, 23 bp, synthetic construct
  source 1..23: mol_type = other DNA
  misc_feature 12..13: note = DNA
  misc_feature order(1..11,14..23): note = RNA
  modified_base 11: mod_base = OTHER; note = 2-Prime-O-Methoxyethyl modified nucleoside
  modified_base 12: mod_base = OTHER; note = DNA nucleotide carrying a 6-amino-5-nitro-3-yl-2(1H)-pyridone nucleobase
  modified_base order(6..8,15): mod_base = OTHER; note = 2-Prime-Fluoro modified nucleoside
  modified_base order(1..5,9..10,14,16..23): mod_base = OTHER; note = 2-Prime-O-Methyl modified nucleoside
  modified_base order(1^2,22^23): mod_base = OTHER; note = (1,3-dimethylimidazolidin-2-ylidene) Phosphoramidate linkage
  modified_base order(2..13,14..22): mod_base = OTHER; note = Phosphorothioate linkage
  modified_base 13^14: mod_base = OTHER; note = Methylphosphonate linkage
  misc_feature 1..23: note = RM110103
acctctgaggantgggttcattt

SEQ ID NO: 312 - DNA, 23 bp, synthetic construct
  source 1..23: mol_type = other DNA
  misc_feature 9..10: note = DNA
  misc_feature order(1..8,11..23): note = RNA
  modified_base 8: mod_base = OTHER; note = 2-Prime-O-Methoxyethyl modified nucleoside
  modified_base 9: mod_base = OTHER; note = DNA nucleotide carrying a 6-amino-5-nitro-3-yl-2(1H)-pyridone nucleobase
  modified_base order(3..5,12): mod_base = OTHER; note = 2-Prime-Fluoro modified nucleoside
  modified_base order(1..2,6..7,11,13..23): mod_base = OTHER; note = 2-Prime-O-Methyl modified nucleoside
  modified_base order(1^2,22^23): mod_base = OTHER; note = (1,3-dimethylimidazolidin-2-ylidene) Phosphoramidate linkage
  modified_base order(2..10,11..22): mod_base = OTHER; note = Phosphorothioate linkage
  modified_base 10^11: mod_base = OTHER; note = Methylphosphonate linkage
  misc_feature 1..23: note = RM110104
tctgaggantgggttcatttttc

SEQ ID NO: 313 - DNA, 23 bp, synthetic construct
  source 1..23: mol_type = other DNA
  misc_feature 18..19: note = DNA
  misc_feature order(1..17,20..23): note = RNA
  modified_base 17: mod_base = OTHER; note = 2-Prime-O-Methoxyethyl modified nucleoside
  modified_base 18: mod_base = OTHER; note = DNA nucleotide carrying a 6-amino-5-nitro-3-yl-2(1H)-pyridone nucleobase
  modified_base order(14,21): mod_base = OTHER; note = 2-Prime-Fluoro modified nucleoside
  modified_base order(1..13,15..16,20,22..23): mod_base = OTHER; note = 2-Prime-O-Methyl modified nucleoside
  modified_base order(1^2,22^23): mod_base = OTHER; note = (1,3-dimethylimidazolidin-2-ylidene) Phosphoramidate linkage
  modified_base order(2..19,20..22): mod_base = OTHER; note = Phosphorothioate linkage
  modified_base 19^20: mod_base = OTHER; note = Methylphosphonate linkage
  misc_feature 1..23: note = RM110105
ggtcaaacctctgaggantgggt

SEQ ID NO: 314 - DNA, 23 bp, synthetic construct
  source 1..23: mol_type = other DNA
  misc_feature 15..16: note = DNA
  misc_feature order(1..14,17..23): note = RNA
  modified_base 14: mod_base = OTHER; note = 2-Prime-O-Methoxyethyl modified nucleoside
  modified_base 15: mod_base = OTHER; note = DNA nucleotide carrying a 6-amino-5-nitro-3-yl-2(1H)-pyridone nucleobase
  modified_base order(11,18): mod_base = OTHER; note = 2-Prime-Fluoro modified nucleoside
  modified_base order(1..10,12..13,17,19..23): mod_base = OTHER; note = 2-Prime-O-Methyl modified nucleoside
  modified_base order(1^2,22^23): mod_base = OTHER; note = (1,3-dimethylimidazolidin-2-ylidene) Phosphoramidate linkage
  modified_base order(2..16,17..22): mod_base = OTHER; note = Phosphorothioate linkage
  modified_base 16^17: mod_base = OTHER; note = Methylphosphonate linkage
  misc_feature 1..23: note = RM110106
caaacctctgaggantgggttca

SEQ ID NO: 315 - DNA, 23 bp, synthetic construct
  source 1..23: mol_type = other DNA
  misc_feature 12..13: note = DNA
  misc_feature order(1..11,14..23): note = RNA
  modified_base 11: mod_base = OTHER; note = 2-Prime-O-Methoxyethyl modified nucleoside
  modified_base 12: mod_base = OTHER; note = DNA nucleotide carrying a 6-amino-5-nitro-3-yl-2(1H)-pyridone nucleobase
  modified_base order(8,15): mod_base = OTHER; note = 2-Prime-Fluoro modified nucleoside
  modified_base order(1..7,9..10,14,16..23): mod_base = OTHER; note = 2-Prime-O-Methyl modified nucleoside
  modified_base order(1^2,22^23): mod_base = OTHER; note = (1,3-dimethylimidazolidin-2-ylidene) Phosphoramidate linkage
  modified_base order(2..13,14..22): mod_base = OTHER; note = Phosphorothioate linkage
  modified_base 13^14: mod_base = OTHER; note = Methylphosphonate linkage
  misc_feature 1..23: note = RM110107
acctctgaggantgggttcattt

SEQ ID NO: 316 - DNA, 23 bp, synthetic construct
  source 1..23: mol_type = other DNA
  misc_feature 9..10: note = DNA
  misc_feature order(1..8,11..23): note = RNA
  modified_base 8: mod_base = OTHER; note = 2-Prime-O-Methoxyethyl modified nucleoside
  modified_base 9: mod_base = OTHER; note = DNA nucleotide carrying a 6-amino-5-nitro-3-yl-2(1H)-pyridone nucleobase
  modified_base order(5,12): mod_base = OTHER; note = 2-Prime-Fluoro modified nucleoside
  modified_base order(1..4,6..7,11,13..23): mod_base = OTHER; note = 2-Prime-O-Methyl modified nucleoside
  modified_base order(1^2,22^23): mod_base = OTHER; note = (1,3-dimethylimidazolidin-2-ylidene) Phosphoramidate linkage
  modified_base order(2..10,11..22): mod_base = OTHER; note = Phosphorothioate linkage
  modified_base 10^11: mod_base = OTHER; note = Methylphosphonate linkage
  misc_feature 1..23: note = RM110108
tctgaggantgggttcatttttc

SEQ ID NO: 317 - DNA, 23 bp, synthetic construct
  source 1..23: mol_type = other DNA
  misc_feature 6..7: note = DNA
  misc_feature order(1..5,8..23): note = RNA
  modified_base 5: mod_base = OTHER; note = 2-Prime-O-Methoxyethyl modified nucleoside
  modified_base 6: mod_base = OTHER; note = DNA nucleotide carrying a 6-amino-5-nitro-3-yl-2(1H)-pyridone nucleobase
  modified_base order(2,9): mod_base = OTHER; note = 2-Prime-Fluoro modified nucleoside
  modified_base order(1,3..4,8,10..23): mod_base = OTHER; note = 2-Prime-O-Methyl modified nucleoside
  modified_base order(1^2,22^23): mod_base = OTHER; note = (1,3-dimethylimidazolidin-2-ylidene) Phosphoramidate linkage
  modified_base order(2..7,8..22): mod_base = OTHER; note = Phosphorothioate linkage
  modified_base 7^8: mod_base = OTHER; note = Methylphosphonate linkage
  misc_feature 1..23: note = RM110109
gaggantgggttcatttttcttg

SEQ ID NO: 318 - DNA, 26 bp, synthetic construct
  source 1..26: mol_type = other DNA
  misc_feature 22..23: note = DNA
  misc_feature order(1..21,24..26): note = RNA
  modified_base 21: mod_base = OTHER; note = 2-Prime-O-Methoxyethyl modified nucleoside
  modified_base 22: mod_base = OTHER; note = DNA nucleotide carrying a 6-amino-5-nitro-3-yl-2(1H)-pyridone nucleobase
  modified_base order(18,25): mod_base = OTHER; note = 2-Prime-Fluoro modified nucleoside
  modified_base order(1..17,19..20,24,26): mod_base = OTHER; note = 2-Prime-O-Methyl modified nucleoside
  modified_base order(1^2,25^26): mod_base = OTHER; note = (1,3-dimethylimidazolidin-2-ylidene) Phosphoramidate linkage
  modified_base order(2..23,24^25): mod_base = OTHER; note = Phosphorothioate linkage
  modified_base 23^24: mod_base = OTHER; note = Methylphosphonate linkage
  misc_feature 1..26: note = RM110110
attcggtcaaacctctgaggantggg

SEQ ID NO: 319 - DNA, 26 bp, synthetic construct
  source 1..26: mol_type = other DNA
  misc_feature 19..20: note = DNA
  misc_feature order(1..18,21..26): note = RNA
  modified_base 18: mod_base = OTHER; note = 2-Prime-O-Methoxyethyl modified nucleoside
  modified_base 19: mod_base = OTHER; note = DNA nucleotide carrying a 6-amino-5-nitro-3-yl-2(1H)-pyridone nucleobase
  modified_base order(15,22): mod_base = OTHER; note = 2-Prime-Fluoro modified nucleoside
  modified_base order(1..14,16..17,21,23..26): mod_base = OTHER; note = 2-Prime-O-Methyl modified nucleoside
  modified_base order(1^2,25^26): mod_base = OTHER; note = (1,3-dimethylimidazolidin-2-ylidene) Phosphoramidate linkage
  modified_base order(2..20,21..25): mod_base = OTHER; note = Phosphorothioate linkage
  modified_base 20^21: mod_base = OTHER; note = Methylphosphonate linkage
  misc_feature 1..26: note = RM110111
cggtcaaacctctgaggantgggttc

SEQ ID NO: 320 - DNA, 26 bp, synthetic construct
  source 1..26: mol_type = other DNA
  misc_feature 16..17: note = DNA
  misc_feature order(1..15,18..26): note = RNA
  modified_base 15: mod_base = OTHER; note = 2-Prime-O-Methoxyethyl modified nucleoside
  modified_base 16: mod_base = OTHER; note = DNA nucleotide carrying a 6-amino-5-nitro-3-yl-2(1H)-pyridone nucleobase
  modified_base order(12,19): mod_base = OTHER; note = 2-Prime-Fluoro modified nucleoside
  modified_base order(1..11,13..14,18,20..26): mod_base = OTHER; note = 2-Prime-O-Methyl modified nucleoside
  modified_base order(1^2,25^26): mod_base = OTHER; note = (1,3-dimethylimidazolidin-2-ylidene) Phosphoramidate linkage
  modified_base order(2..17,18..25): mod_base = OTHER; note = Phosphorothioate linkage
  modified_base 17^18: mod_base = OTHER; note = Methylphosphonate linkage
  misc_feature 1..26: note = RM110112
tcaaacctctgaggantgggttcatt

SEQ ID NO: 321 - DNA, 26 bp, synthetic construct
  source 1..26: mol_type = other DNA
  misc_feature 13..14: note = DNA
  misc_feature order(1..12,15..26): note = RNA
  modified_base 12: mod_base = OTHER; note = 2-Prime-O-Methoxyethyl modified nucleoside
  modified_base 13: mod_base = OTHER; note = DNA nucleotide carrying a 6-amino-5-nitro-3-yl-2(1H)-pyridone nucleobase
  modified_base order(9,16): mod_base = OTHER; note = 2-Prime-Fluoro modified nucleoside
  modified_base order(1..8,10..11,15,17..26): mod_base = OTHER; note = 2-Prime-O-Methyl modified nucleoside
  modified_base order(1^2,25^26): mod_base = OTHER; note = (1,3-dimethylimidazolidin-2-ylidene) Phosphoramidate linkage
  modified_base order(2..14,15..25): mod_base = OTHER; note = Phosphorothioate linkage
  modified_base 14^15: mod_base = OTHER; note = Methylphosphonate linkage
  misc_feature 1..26: note = RM110113
aacctctgaggantgggttcattttt

SEQ ID NO: 322 - DNA, 26 bp, synthetic construct
  source 1..26: mol_type = other DNA
  misc_feature 10..11: note = DNA
  misc_feature order(1..9,12..26): note = RNA
  modified_base 9: mod_base = OTHER; note = 2-Prime-O-Methoxyethyl modified nucleoside
  modified_base 10: mod_base = OTHER; note = DNA nucleotide carrying a 6-amino-5-nitro-3-yl-2(1H)-pyridone nucleobase
  modified_base order(6,13): mod_base = OTHER; note = 2-Prime-Fluoro modified nucleoside
  modified_base order(1..5,7..8,12,14..26): mod_base = OTHER; note = 2-Prime-O-Methyl modified nucleoside
  modified_base order(1^2,25^26): mod_base = OTHER; note = (1,3-dimethylimidazolidin-2-ylidene) Phosphoramidate linkage
  modified_base order(2..11,12..25): mod_base = OTHER; note = Phosphorothioate linkage
  modified_base 11^12: mod_base = OTHER; note = Methylphosphonate linkage
  misc_feature 1..26: note = RM110114
ctctgaggantgggttcatttttctt

SEQ ID NO: 323 - DNA, 26 bp, synthetic construct
  source 1..26: mol_type = other DNA
  misc_feature 7..8: note = DNA
  misc_feature order(1..6,9..26): note = RNA
  modified_base 6: mod_base = OTHER; note = 2-Prime-O-Methoxyethyl modified nucleoside
  modified_base 7: mod_base = OTHER; note = DNA nucleotide carrying a 6-amino-5-nitro-3-yl-2(1H)-pyridone nucleobase
  modified_base order(3,10): mod_base = OTHER; note = 2-Prime-Fluoro modified nucleoside
  modified_base order(1..2,4..5,9,11..26): mod_base = OTHER; note = 2-Prime-O-Methyl modified nucleoside
  modified_base order(1^2,25^26): mod_base = OTHER; note = (1,3-dimethylimidazolidin-2-ylidene) Phosphoramidate linkage
  modified_base order(2..8,9..25): mod_base = OTHER; note = Phosphorothioate linkage
  modified_base 8^9: mod_base = OTHER; note = Methylphosphonate linkage
  misc_feature 1..26: note = RM110115
tgaggantgggttcatttttcttgtc

SEQ ID NO: 324 - DNA, 29 bp, synthetic construct
  source 1..29: mol_type = other DNA
  misc_feature 24..25: note = DNA
  misc_feature order(1..23,26..29): note = RNA
  modified_base 23: mod_base = OTHER; note = 2-Prime-O-Methoxyethyl modified nucleoside
  modified_base 24: mod_base = OTHER; note = DNA nucleotide carrying a 6-amino-5-nitro-3-yl-2(1H)-pyridone nucleobase
  modified_base order(20,27): mod_base = OTHER; note = 2-Prime-Fluoro modified nucleoside
  modified_base order(1..19,21..22,26,28..29): mod_base = OTHER; note = 2-Prime-O-Methyl modified nucleoside
  modified_base order(1^2,28^29): mod_base = OTHER; note = (1,3-dimethylimidazolidin-2-ylidene) Phosphoramidate linkage
  modified_base order(2..25,26..28): mod_base = OTHER; note = Phosphorothioate linkage
  modified_base 25^26: mod_base = OTHER; note = Methylphosphonate linkage
  misc_feature 1..29: note = RM110116
caattcggtcaaacctctgaggantgggt

SEQ ID NO: 325 - DNA, 29 bp, synthetic construct
  source 1..29: mol_type = other DNA
  misc_feature 21..22: note = DNA
  misc_feature order(1..20,23..29): note = RNA
  modified_base 20: mod_base = OTHER; note = 2-Prime-O-Methoxyethyl modified nucleoside
  modified_base 21: mod_base = OTHER; note = DNA nucleotide carrying a 6-amino-5-nitro-3-yl-2(1H)-pyridone nucleobase
  modified_base order(17,24): mod_base = OTHER; note = 2-Prime-Fluoro modified nucleoside
  modified_base order(1..16,18..19,23,25..29): mod_base = OTHER; note = 2-Prime-O-Methyl modified nucleoside
  modified_base order(1^2,28^29): mod_base = OTHER; note = (1,3-dimethylimidazolidin-2-ylidene) Phosphoramidate linkage
  modified_base order(2..22,23..28): mod_base = OTHER; note = Phosphorothioate linkage
  modified_base 22^23: mod_base = OTHER; note = Methylphosphonate linkage
  misc_feature 1..29: note = RM110117
ttcggtcaaacctctgaggantgggttca

SEQ ID NO: 326 - DNA, 29 bp, synthetic construct
  source 1..29: mol_type = other DNA
  misc_feature 18..19: note = DNA
  misc_feature order(1..17,20..29): note = RNA
  modified_base 17: mod_base = OTHER; note = 2-Prime-O-Methoxyethyl modified nucleoside
  modified_base 18: mod_base = OTHER; note = DNA nucleotide carrying a 6-amino-5-nitro-3-yl-2(1H)-pyridone nucleobase
  modified_base order(14,21): mod_base = OTHER; note = 2-Prime-Fluoro modified nucleoside
  modified_base order(1..13,15..16,20,22..29): mod_base = OTHER; note = 2-Prime-O-Methyl modified nucleoside
  modified_base order(1^2,28^29): mod_base = OTHER; note = (1,3-dimethylimidazolidin-2-ylidene) Phosphoramidate linkage
  modified_base order(2..19,20..28): mod_base = OTHER; note = Phosphorothioate linkage
  modified_base 19^20: mod_base = OTHER; note = Methylphosphonate linkage
  misc_feature 1..29: note = RM110118
ggtcaaacctctgaggantgggttcattt

SEQ ID NO: 327 - DNA, 29 bp, synthetic construct
  source 1..29: mol_type = other DNA
  misc_feature 15..16: note = DNA
  misc_feature order(1..14,17..29): note = RNA
  modified_base 14: mod_base = OTHER; note = 2-Prime-O-Methoxyethyl modified nucleoside
  modified_base 15: mod_base = OTHER; note = DNA nucleotide carrying a 6-amino-5-nitro-3-yl-2(1H)-pyridone nucleobase
  modified_base order(11,18): mod_base = OTHER; note = 2-Prime-Fluoro modified nucleoside
  modified_base order(1..10,12..13,17,19..29): mod_base = OTHER; note = 2-Prime-O-Methyl modified nucleoside
  modified_base order(1^2,28^29): mod_base = OTHER; note = (1,3-dimethylimidazolidin-2-ylidene) Phosphoramidate linkage
  modified_base order(2..16,17..28): mod_base = OTHER; note = Phosphorothioate linkage
  modified_base 16^17: mod_base = OTHER; note = Methylphosphonate linkage
  misc_feature 1..29: note = RM110119
caaacctctgaggantgggttcatttttc

SEQ ID NO: 328 - DNA, 29 bp, synthetic construct
  source 1..29: mol_type = other DNA
  misc_feature 12..13: note = DNA
  misc_feature order(1..11,14..29): note = RNA
  modified_base 11: mod_base = OTHER; note = 2-Prime-O-Methoxyethyl modified nucleoside
  modified_base 12: mod_base = OTHER; note = DNA nucleotide carrying a 6-amino-5-nitro-3-yl-2(1H)-pyridone nucleobase
  modified_base order(8,15): mod_base = OTHER; note = 2-Prime-Fluoro modified nucleoside
  modified_base order(1..7,9..10,14,16..29): mod_base = OTHER; note = 2-Prime-O-Methyl modified nucleoside
  modified_base order(1^2,28^29): mod_base = OTHER; note = (1,3-dimethylimidazolidin-2-ylidene) Phosphoramidate linkage
  modified_base order(2..13,14..28): mod_base = OTHER; note = Phosphorothioate linkage
  modified_base 13^14: mod_base = OTHER; note = Methylphosphonate linkage
  misc_feature 1..29: note = RM110120
acctctgaggantgggttcatttttcttg

SEQ ID NO: 329 - DNA, 29 bp, synthetic construct
  source 1..29: mol_type = other DNA
  misc_feature 9..10: note = DNA
  misc_feature order(1..8,11..29): note = RNA
  modified_base 8: mod_base = OTHER; note = 2-Prime-O-Methoxyethyl modified nucleoside
  modified_base 9: mod_base = OTHER; note = DNA nucleotide carrying a 6-amino-5-nitro-3-yl-2(1H)-pyridone nucleobase
  modified_base order(5,12): mod_base = OTHER; note = 2-Prime-Fluoro modified nucleoside
  modified_base order(1..4,6..7,11,13..29): mod_base = OTHER; note = 2-Prime-O-Methyl modified nucleoside
  modified_base order(1^2,28^29): mod_base = OTHER; note = (1,3-dimethylimidazolidin-2-ylidene) Phosphoramidate linkage
  modified_base order(2..10,11..28): mod_base = OTHER; note = Phosphorothioate linkage
  modified_base 10^11: mod_base = OTHER; note = Methylphosphonate linkage
  misc_feature 1..29: note = RM110121
tctgaggantgggttcatttttcttgtct

SEQ ID NO: 330 - DNA, 29 bp, synthetic construct
  source 1..29: mol_type = other DNA
  misc_feature 6..7: note = DNA
  misc_feature order(1..5,8..29): note = RNA
  modified_base 5: mod_base = OTHER; note = 2-Prime-O-Methoxyethyl modified nucleoside
  modified_base 6: mod_base = OTHER; note = DNA nucleotide carrying a 6-amino-5-nitro-3-yl-2(1H)-pyridone nucleobase
  modified_base order(2,9): mod_base = OTHER; note = 2-Prime-Fluoro modified nucleoside
  modified_base order(1,3..4,8,10..29): mod_base = OTHER; note = 2-Prime-O-Methyl modified nucleoside
  modified_base order(1^2,28^29): mod_base = OTHER; note = (1,3-dimethylimidazolidin-2-ylidene) Phosphoramidate linkage
  modified_base order(2..7,8..28): mod_base = OTHER; note = Phosphorothioate linkage
  modified_base 7^8: mod_base = OTHER; note = Methylphosphonate linkage
  misc_feature 1..29: note = RM110122
gaggantgggttcatttttcttgtctctt

SEQ ID NO: 331 - DNA, 29 bp, synthetic construct
  source 1..29: mol_type = other DNA
  misc_feature 24..25: note = DNA
  misc_feature order(1..23,26..29): note = RNA
  modified_base 23: mod_base = OTHER; note = 2-Prime-O-Methoxyethyl modified nucleoside
  modified_base 24: mod_base = OTHER; note = DNA nucleotide carrying a 6-amino-5-nitro-3-yl-2(1H)-pyridone nucleobase
  modified_base order(1..4,15,17,21,27): mod_base = OTHER; note = 2-Prime-Fluoro modified nucleoside
  modified_base order(5..14,16,18..20,22,26,28..29): mod_base = OTHER; note = 2-Prime-O-Methyl modified nucleoside
  modified_base order(1^2,28^29): mod_base = OTHER; note = (1,3-dimethylimidazolidin-2-ylidene) Phosphoramidate linkage
  modified_base order(2..25,26..28): mod_base = OTHER; note = Phosphorothioate linkage
  modified_base 25^26: mod_base = OTHER; note = Methylphosphonate linkage
  misc_feature 1..29: note = RM110123
caattcggtcaaacctctgaggantgggt

SEQ ID NO: 332 - DNA, 26 bp, synthetic construct
  source 1..26: mol_type = other DNA
  misc_feature 22..23: note = DNA
  misc_feature order(1..21,24..26): note = RNA
  modified_base 21: mod_base = OTHER; note = 2-Prime-O-Methoxyethyl modified nucleoside
  modified_base 22: mod_base = OTHER; note = DNA nucleotide carrying a 6-amino-5-nitro-3-yl-2(1H)-pyridone nucleobase
  modified_base order(2,13,15,19,25): mod_base = OTHER; note = 2-Prime-Fluoro modified nucleoside
  modified_base order(1,3..12,14,16..18,20,24,26): mod_base = OTHER; note = 2-Prime-O-Methyl modified nucleoside
  modified_base order(1^2,25^26): mod_base = OTHER; note = (1,3-dimethylimidazolidin-2-ylidene) Phosphoramidate linkage
  modified_base order(2..23,24^25): mod_base = OTHER; note = Phosphorothioate linkage
  modified_base 23^24: mod_base = OTHER; note = Methylphosphonate linkage
  misc_feature 1..26: note = RM110124
attcggtcaaacctctgaggantggg

SEQ ID NO: 333 - DNA, 29 bp, synthetic construct
  source 1..29: mol_type = other DNA
  misc_feature 24..25: note = DNA
  misc_feature order(1..23,26..29): note = RNA
  modified_base 23: mod_base = OTHER; note = 2-Prime-O-Methoxyethyl modified nucleoside
  modified_base 24: mod_base = OTHER; note = DNA nucleotide carrying a 6-amino-5-nitro-3-yl-2(1H)-pyridone nucleobase
  modified_base order(4,15,17,21,27): mod_base = OTHER; note = 2-Prime-Fluoro modified nucleoside
  modified_base order(1..3,5..14,16,18..20,22,26,28..29): mod_base = OTHER; note = 2-Prime-O-Methyl modified nucleoside
  modified_base order(1^2,28^29): mod_base = OTHER; note = (1,3-dimethylimidazolidin-2-ylidene) Phosphoramidate linkage
  modified_base order(2..25,26..28): mod_base = OTHER; note = Phosphorothioate linkage
  modified_base 25^26: mod_base = OTHER; note = Methylphosphonate linkage
  misc_feature 1..29: note = RM110125
caattcggtcaaacctctgaggantgggt

SEQ ID NO: 334 - DNA, 29 bp, synthetic construct
  source 1..29: mol_type = other DNA
  misc_feature 21..22: note = DNA
  misc_feature order(1..20,23..29): note = RNA
  modified_base 20: mod_base = OTHER; note = 2-Prime-O-Methoxyethyl modified nucleoside
  modified_base 21: mod_base = OTHER; note = DNA nucleotide carrying a 6-amino-5-nitro-3-yl-2(1H)-pyridone nucleobase
  modified_base order(1,12,14,18,24): mod_base = OTHER; note = 2-Prime-Fluoro modified nucleoside
  modified_base order(2..11,13,15..17,19,23,25..29): mod_base = OTHER; note = 2-Prime-O-Methyl modified nucleoside
  modified_base order(1^2,28^29): mod_base = OTHER; note = (1,3-dimethylimidazolidin-2-ylidene) Phosphoramidate linkage
  modified_base order(2..22,23..28): mod_base = OTHER; note = Phosphorothioate linkage
  modified_base 22^23: mod_base = OTHER; note = Methylphosphonate linkage
  misc_feature 1..29: note = RM110126
ttcggtcaaacctctgaggantgggttca

SEQ ID NO: 335 - DNA, 32 bp, synthetic construct; identical to SEQ ID NO: 133
  source 1..32: mol_type = other DNA
  misc_feature 10..11: note = DNA
  misc_feature order(1..9,12..32): note = RNA
  modified_base 9: mod_base = OTHER; note = 2-Prime-O-Methoxyethyl modified nucleoside
  modified_base 10: mod_base = OTHER; note = DNA nucleotide carrying a 6-amino-5-nitro-3-yl-2(1H)-pyridone nucleobase
  modified_base order(1,7,13,20,26,32): mod_base = OTHER; note = 2-Prime-Fluoro modified nucleoside
  modified_base order(2..6,8,12,14..19,21..25,27..31): mod_base = OTHER; note = 2-Prime-O-Methyl modified nucleoside
  modified_base order(1^2,31^32): mod_base = OTHER; note = (1,3-dimethylimidazolidin-2-ylidene) Phosphoramidate linkage
  modified_base order(2..11,12..31): mod_base = OTHER; note = Phosphorothioate linkage
  modified_base 11^12: mod_base = OTHER; note = Methylphosphonate linkage
  misc_feature 1..32: note = RM110127

SEQ ID NO: 336 - DNA, 23 bp, synthetic construct
  source 1..23: mol_type = other DNA
  misc_feature 6..7: note = DNA
  misc_feature order(1..5,8..23): note = RNA
  modified_base 5: mod_base = OTHER; note = 2-Prime-O-Methoxyethyl modified nucleoside
  modified_base 6: mod_base = OTHER; note = DNA nucleotide carrying a 6-amino-5-nitro-3-yl-2(1H)-pyridone nucleobase
  modified_base order(3,9,16,22): mod_base = OTHER; note = 2-Prime-Fluoro modified nucleoside
  modified_base order(1..2,4,8,10..15,17..21,23): mod_base = OTHER; note = 2-Prime-O-Methyl modified nucleoside
  modified_base order(1^2,22^23): mod_base = OTHER; note = (1,3-dimethylimidazolidin-2-ylidene) Phosphoramidate linkage
  modified_base order(2..7,8..22): mod_base = OTHER; note = Phosphorothioate linkage
  modified_base 7^8: mod_base = OTHER; note = Methylphosphonate linkage
  misc_feature 1..23: note = RM110128
gaggantgggttcatttttcttg

SEQ ID NO: 337 - DNA, 23 bp, synthetic construct
  source 1..23: mol_type = other DNA
  misc_feature 18..19: note = DNA
  misc_feature order(1..17,20..23): note = RNA
  modified_base 17: mod_base = OTHER; note = 2-Prime-O-Methoxyethyl modified nucleoside
  modified_base 18: mod_base = OTHER; note = DNA nucleotide carrying a 6-amino-5-nitro-3-yl-2(1H)-pyridone nucleobase
  modified_base order(4,10,21,23): mod_base = OTHER; note = 2-Prime-Fluoro modified nucleoside
  modified_base order(1..3,5..9,11..16,20,22): mod_base = OTHER; note = 2-Prime-O-Methyl modified nucleoside
  modified_base order(1^2,22^23): mod_base = OTHER; note = (1,3-dimethylimidazolidin-2-ylidene) Phosphoramidate linkage
  modified_base order(2..19,20..22): mod_base = OTHER; note = Phosphorothioate linkage
  modified_base 19^20: mod_base = OTHER; note = Methylphosphonate linkage
  misc_feature 1..23: note = RM110129
ggtcaaacctctgaggantgggt

SEQ ID NO: 338 - DNA, 23 bp, synthetic construct
  source 1..23: mol_type = other DNA
  misc_feature 15..16: note = DNA
  misc_feature order(1..14,17..23): note = RNA
  modified_base 14: mod_base = OTHER; note = 2-Prime-O-Methoxyethyl modified nucleoside
  modified_base 15: mod_base = OTHER; note = DNA nucleotide carrying a 6-amino-5-nitro-3-yl-2(1H)-pyridone nucleobase
  modified_base order(1,7,18,20): mod_base = OTHER; note = 2-Prime-Fluoro modified nucleoside
  modified_base order(2..6,8..13,17,19,21..23): mod_base = OTHER; note = 2-Prime-O-Methyl modified nucleoside
  modified_base order(1^2,22^23): mod_base = OTHER; note = (1,3-dimethylimidazolidin-2-ylidene) Phosphoramidate linkage
  modified_base order(2..16,17..22): mod_base = OTHER; note = Phosphorothioate linkage
  modified_base 16^17: mod_base = OTHER; note = Methylphosphonate linkage
  misc_feature 1..23: note = RM110130
caaacctctgaggantgggttca

SEQ ID NO: 339 - DNA, 32 bp, synthetic construct; identical to SEQ ID NO: 129
  source 1..32: mol_type = other DNA
  misc_feature 22..23: note = DNA
  misc_feature order(1..21,24..32): note = RNA
  modified_base 21: mod_base = OTHER; note = 2-Prime-O-Methoxyethyl modified nucleoside
  modified_base 22: mod_base = OTHER; note = DNA nucleotide carrying a 6-amino-5-nitro-3-yl-2(1H)-pyridone nucleobase
  modified_base order(4,7..8,10,25,30): mod_base = OTHER; note = 2-Prime-Fluoro modified nucleoside
  modified_base order(1..3,5..6,9,11..20,24,26..29,31..32): mod_base = OTHER; note = 2-Prime-O-Methyl modified nucleoside
  modified_base order(1^2,31^32): mod_base = OTHER; note = (1,3-dimethylimidazolidin-2-ylidene) Phosphoramidate linkage
  modified_base order(2..23,24..31): mod_base = OTHER; note = Phosphorothioate linkage
  modified_base 23^24: mod_base = OTHER; note = Methylphosphonate linkage
  misc_feature 1..32: note = RM110131

SEQ ID NO: 340 - DNA, 32 bp, synthetic construct; identical to SEQ ID NO: 19
  source 1..32: mol_type = other DNA
  misc_feature 19..20: note = DNA
  misc_feature order(1..18,21..32): note = RNA
  modified_base 18: mod_base = OTHER; note = 2-Prime-O-Methoxyethyl modified nucleoside
  modified_base 19: mod_base = OTHER; note = DNA nucleotide carrying a 6-amino-5-nitro-3-yl-2(1H)-pyridone nucleobase
  modified_base order(1,4..5,7,22,27): mod_base = OTHER; note = 2-Prime-Fluoro modified nucleoside
  modified_base order(2..3,6,8..17,21,23..26,28..32): mod_base = OTHER; note = 2-Prime-O-Methyl modified nucleoside
  modified_base order(1^2,31^32): mod_base = OTHER; note = (1,3-dimethylimidazolidin-2-ylidene) Phosphoramidate linkage
  modified_base order(2..20,21..31): mod_base = OTHER; note = Phosphorothioate linkage
  modified_base 20^21: mod_base = OTHER; note = Methylphosphonate linkage
  misc_feature 1..32: note = RM110132

SEQ ID NO: 341 - DNA, 32 bp, synthetic construct; identical to SEQ ID NO: 133
  source 1..32: mol_type = other DNA
  misc_feature 10..11: note = DNA
  misc_feature order(1..9,12..32): note = RNA
  modified_base 9: mod_base = OTHER; note = 2-Prime-O-Methoxyethyl modified nucleoside
  modified_base 10: mod_base = OTHER; note = DNA nucleotide carrying a 6-amino-5-nitro-3-yl-2(1H)-pyridone nucleobase
  modified_base order(4,13,24,26..27,30): mod_base = OTHER; note = 2-Prime-Fluoro modified nucleoside
  modified_base order(1..3,5..8,12,14..23,25,28..29,31..32): mod_base = OTHER; note = 2-Prime-O-Methyl modified nucleoside
  modified_base order(1^2,31^32): mod_base = OTHER; note = (1,3-dimethylimidazolidin-2-ylidene) Phosphoramidate linkage
  modified_base order(2..11,12..31): mod_base = OTHER; note = Phosphorothioate linkage
  modified_base 11^12: mod_base = OTHER; note = Methylphosphonate linkage
  misc_feature 1..32: note = RM110133

SEQ ID NO: 342 - DNA, 32 bp, synthetic construct; identical to SEQ ID NO: 134
  source 1..32: mol_type = other DNA
  misc_feature 7..8: note = DNA
  misc_feature order(1..6,9..32): note = RNA
  modified_base 6: mod_base = OTHER; note = 2-Prime-O-Methoxyethyl modified nucleoside
  modified_base 7: mod_base = OTHER; note = DNA nucleotide carrying a 6-amino-5-nitro-3-yl-2(1H)-pyridone nucleobase
  modified_base order(1,10,21,23..24,27): mod_base = OTHER; note = 2-Prime-Fluoro modified nucleoside
  modified_base order(2..5,9,11..20,22,25..26,28..32): mod_base = OTHER; note = 2-Prime-O-Methyl modified nucleoside
  modified_base order(1^2,31^32): mod_base = OTHER; note = (1,3-dimethylimidazolidin-2-ylidene) Phosphoramidate linkage
  modified_base order(2..8,9..31): mod_base = OTHER; note = Phosphorothioate linkage
  modified_base 8^9: mod_base = OTHER; note = Methylphosphonate linkage
  misc_feature 1..32: note = RM110134

SEQ ID NO: 343 - DNA, 23 bp, synthetic construct
  source 1..23: mol_type = other DNA
  misc_feature 18..19: note = DNA
  misc_feature order(1..17,20..23): note = RNA
  modified_base 17: mod_base = OTHER; note = 2-Prime-O-Methoxyethyl modified nucleoside
  modified_base 18: mod_base = OTHER; note = DNA nucleotide carrying a 6-amino-5-nitro-3-yl-2(1H)-pyridone nucleobase
  modified_base order(3..4,6,21): mod_base = OTHER; note = 2-Prime-Fluoro modified nucleoside
  modified_base order(1..2,5,7..16,20,22..23): mod_base = OTHER; note = 2-Prime-O-Methyl modified nucleoside
  modified_base order(1^2,22^23): mod_base = OTHER; note = (1,3-dimethylimidazolidin-2-ylidene) Phosphoramidate linkage
  modified_base order(2..19,20..22): mod_base = OTHER; note = Phosphorothioate linkage
  modified_base 19^20: mod_base = OTHER; note = Methylphosphonate linkage
  misc_feature 1..23: note = RM110135
ggtcaaacctctgaggantgggt

SEQ ID NO: 344 - DNA, 23 bp, synthetic construct
  source 1..23: mol_type = other DNA
  misc_feature 18..19: note = DNA
  misc_feature order(1..17,20..23): note = RNA
  modified_base 17: mod_base = OTHER; note = 2-Prime-O-Methoxyethyl modified nucleoside
  modified_base 18: mod_base = OTHER; note = DNA nucleotide carrying a 6-amino-5-nitro-3-yl-2(1H)-pyridone nucleobase
  modified_base order(6,21): mod_base = OTHER; note = 2-Prime-Fluoro modified nucleoside
  modified_base order(1..5,7..16,20,22..23): mod_base = OTHER; note = 2-Prime-O-Methyl modified nucleoside
  modified_base order(1^2,22^23): mod_base = OTHER; note = (1,3-dimethylimidazolidin-2-ylidene) Phosphoramidate linkage
  modified_base order(2..19,20..22): mod_base = OTHER; note = Phosphorothioate linkage
  modified_base 19^20: mod_base = OTHER; note = Methylphosphonate linkage
  misc_feature 1..23: note = RM110136
ggtcaaacctctgaggantgggt

SEQ ID NO: 345 - DNA, 23 bp, synthetic construct
  source 1..23: mol_type = other DNA
  misc_feature 15..16: note = DNA
  misc_feature order(1..14,17..23): note = RNA
  modified_base 14: mod_base = OTHER; note = 2-Prime-O-Methoxyethyl modified nucleoside
  modified_base 15: mod_base = OTHER; note = DNA nucleotide carrying a 6-amino-5-nitro-3-yl-2(1H)-pyridone nucleobase
  modified_base order(3,18): mod_base = OTHER; note = 2-Prime-Fluoro modified nucleoside
  modified_base order(1..2,4..13,17,19..23): mod_base = OTHER; note = 2-Prime-O-Methyl modified nucleoside
  modified_base order(1^2,22^23): mod_base = OTHER; note = (1,3-dimethylimidazolidin-2-ylidene) Phosphoramidate linkage
  modified_base order(2..16,17..22): mod_base = OTHER; note = Phosphorothioate linkage
  modified_base 16^17: mod_base = OTHER; note = Methylphosphonate linkage
  misc_feature 1..23: note = RM110137
caaacctctgaggantgggttca

SEQ ID NO: 346 - DNA, 26 bp, synthetic construct
  source 1..26: mol_type = other DNA
  misc_feature 22..23: note = DNA
  misc_feature order(1..21,24..26): note = RNA
  modified_base 21: mod_base = OTHER; note = 2-Prime-O-Methoxyethyl modified nucleoside
  modified_base 22: mod_base = OTHER; note = DNA nucleotide carrying a 6-amino-5-nitro-3-yl-2(1H)-pyridone nucleobase
  modified_base order(10,25): mod_base = OTHER; note = 2-Prime-Fluoro modified nucleoside
  modified_base order(1..9,11..20,24,26): mod_base = OTHER; note = 2-Prime-O-Methyl modified nucleoside
  modified_base order(1^2,25^26): mod_base = OTHER; note = (1,3-dimethylimidazolidin-2-ylidene) Phosphoramidate linkage
  modified_base order(2..23,24^25): mod_base = OTHER; note = Phosphorothioate linkage
  modified_base 23^24: mod_base = OTHER; note = Methylphosphonate linkage
  misc_feature 1..26: note = RM110138
attcggtcaaacctctgaggantggg

SEQ ID NO: 347 - DNA, 26 bp, synthetic construct
  source 1..26: mol_type = other DNA
  misc_feature 19..20: note = DNA
  misc_feature order(1..18,21..26): note = RNA
  modified_base 18: mod_base = OTHER; note = 2-Prime-O-Methoxyethyl modified nucleoside
  modified_base 19: mod_base = OTHER; note = DNA nucleotide carrying a 6-amino-5-nitro-3-yl-2(1H)-pyridone nucleobase
  modified_base order(7,22): mod_base = OTHER; note = 2-Prime-Fluoro modified nucleoside
  modified_base order(1..6,8..17,21,23..26): mod_base = OTHER; note = 2-Prime-O-Methyl modified nucleoside
  modified_base order(1^2,25^26): mod_base = OTHER; note = (1,3-dimethylimidazolidin-2-ylidene) Phosphoramidate linkage
  modified_base order(2..20,21..25): mod_base = OTHER; note = Phosphorothioate linkage
  modified_base 20^21: mod_base = OTHER; note = Methylphosphonate linkage
  misc_feature 1..26: note = RM110139
cggtcaaacctctgaggantgggttc

SEQ ID NO: 348 - DNA, 26 bp, synthetic construct
  source 1..26: mol_type = other DNA
  misc_feature 16..17: note = DNA
  misc_feature order(1..15,18..26): note = RNA
  modified_base 15: mod_base = OTHER; note = 2-Prime-O-Methoxyethyl modified nucleoside
  modified_base 16: mod_base = OTHER; note = DNA nucleotide carrying a 6-amino-5-nitro-3-yl-2(1H)-pyridone nucleobase
  modified_base order(4,19): mod_base = OTHER; note = 2-Prime-Fluoro modified nucleoside
  modified_base order(1..3,5..14,18,20..26): mod_base = OTHER; note = 2-Prime-O-Methyl modified nucleoside
  modified_base order(1^2,25^26): mod_base = OTHER; note = (1,3-dimethylimidazolidin-2-ylidene) Phosphoramidate linkage
  modified_base order(2..17,18..25): mod_base = OTHER; note = Phosphorothioate linkage
  modified_base 17^18: mod_base = OTHER; note = Methylphosphonate linkage
  misc_feature 1..26: note = RM110140
tcaaacctctgaggantgggttcatt

SEQ ID NO: 349 - DNA, 26 bp, synthetic construct
  source 1..26: mol_type = other DNA
  misc_feature 13..14: note = DNA
  misc_feature order(1..12,15..26): note = RNA
  modified_base 12: mod_base = OTHER; note = 2-Prime-O-Methoxyethyl modified nucleoside
  modified_base 13: mod_base = OTHER; note = DNA nucleotide carrying a 6-amino-5-nitro-3-yl-2(1H)-pyridone nucleobase
  modified_base order(1,16): mod_base = OTHER; note = 2-Prime-Fluoro modified nucleoside
  modified_base order(2..11,15,17..26): mod_base = OTHER; note = 2-Prime-O-Methyl modified nucleoside
  modified_base order(1^2,25^26): mod_base = OTHER; note = (1,3-dimethylimidazolidin-2-ylidene) Phosphoramidate linkage
  modified_base order(2..14,15..25): mod_base = OTHER; note = Phosphorothioate linkage
  modified_base 14^15: mod_base = OTHER; note = Methylphosphonate linkage
  misc_feature 1..26: note = RM110141
aacctctgaggantgggttcattttt

SEQ ID NO: 350 - DNA, 29 bp, synthetic construct
  source 1..29: mol_type = other DNA
  misc_feature 24..25: note = DNA
  misc_feature order(1..23,26..29): note = RNA
  modified_base 23: mod_base = OTHER; note = 2-Prime-O-Methoxyethyl modified nucleoside
  modified_base 24: mod_base = OTHER; note = DNA nucleotide carrying a 6-amino-5-nitro-3-yl-2(1H)-pyridone nucleobase
  modified_base order(12,27): mod_base = OTHER; note = 2-Prime-Fluoro modified nucleoside
  modified_base order(1..11,13..22,26,28..29): mod_base = OTHER; note = 2-Prime-O-Methyl modified nucleoside
  modified_base order(1^2,28^29): mod_base = OTHER; note = (1,3-dimethylimidazolidin-2-ylidene) Phosphoramidate linkage
  modified_base order(2..25,26..28): mod_base = OTHER; note = Phosphorothioate linkage
  modified_base 25^26: mod_base = OTHER; note = Methylphosphonate linkage
  misc_feature 1..29: note = RM110142
caattcggtcaaacctctgaggantgggt

SEQ ID NO: 351 - DNA, 29 bp, synthetic construct
  source 1..29: mol_type = other DNA
  misc_feature 21..22: note = DNA
  misc_feature order(1..20,23..29): note = RNA
  modified_base 20: mod_base = OTHER; note = 2-Prime-O-Methoxyethyl modified nucleoside
  modified_base 21: mod_base = OTHER; note = DNA nucleotide carrying a 6-amino-5-nitro-3-yl-2(1H)-pyridone nucleobase
  modified_base order(9,24): mod_base = OTHER; note = 2-Prime-Fluoro modified nucleoside
  modified_base order(1..8,10..19,23,25..29): mod_base = OTHER; note = 2-Prime-O-Methyl modified nucleoside
  modified_base order(1^2,28^29): mod_base = OTHER; note = (1,3-dimethylimidazolidin-2-ylidene) Phosphoramidate linkage
  modified_base order(2..22,23..28): mod_base = OTHER; note = Phosphorothioate linkage
  modified_base 22^23: mod_base = OTHER; note = Methylphosphonate linkage
  misc_feature 1..29: note = RM110143
ttcggtcaaacctctgaggantgggttca

SEQ ID NO: 352 - DNA, 29 bp, synthetic construct
  source 1..29: mol_type = other DNA
  misc_feature 18..19: note = DNA
  misc_feature order(1..17,20..29): note = RNA
  modified_base 17: mod_base = OTHER; note = 2-Prime-O-Methoxyethyl modified nucleoside
  modified_base 18: mod_base = OTHER; note = DNA nucleotide carrying a 6-amino-5-nitro-3-yl-2(1H)-pyridone nucleobase
  modified_base order(6,21): mod_base = OTHER; note = 2-Prime-Fluoro modified nucleoside
  modified_base order(1..5,7..16,20,22..29): mod_base = OTHER; note = 2-Prime-O-Methyl modified nucleoside
  modified_base order(1^2,28^29): mod_base = OTHER; note = (1,3-dimethylimidazolidin-2-ylidene) Phosphoramidate linkage
  modified_base order(2..19,20..28): mod_base = OTHER; note = Phosphorothioate linkage
  modified_base 19^20: mod_base = OTHER; note = Methylphosphonate linkage
  misc_feature 1..29: note = RM110144
ggtcaaacctctgaggantgggttcattt

SEQ ID NO: 353 - DNA, 29 bp, synthetic construct
  source 1..29: mol_type = other DNA
  misc_feature 15..16: note = DNA
  misc_feature order(1..14,17..29): note = RNA
  modified_base 14: mod_base = OTHER; note = 2-Prime-O-Methoxyethyl modified nucleoside
  modified_base 15: mod_base = OTHER; note = DNA nucleotide carrying a 6-amino-5-nitro-3-yl-2(1H)-pyridone nucleobase
  modified_base order(3,18): mod_base = OTHER; note = 2-Prime-Fluoro modified nucleoside
  modified_base order(1..2,4..13,17,19..29): mod_base = OTHER; note = 2-Prime-O-Methyl modified nucleoside
  modified_base order(1^2,28^29): mod_base = OTHER; note = (1,3-dimethylimidazolidin-2-ylidene) Phosphoramidate linkage
  modified_base order(2..16,17..28): mod_base = OTHER; note = Phosphorothioate linkage
  modified_base 16^17: mod_base = OTHER; note = Methylphosphonate linkage
  misc_feature 1..29: note = RM110145
caaacctctgaggantgggttcatttttc

SEQ ID NO: 354 - DNA, 32 bp, synthetic construct; identical to SEQ ID NO: 128
  source 1..32: mol_type = other DNA
  misc_feature 25..26: note = DNA
  misc_feature order(1..24,27..32): note = RNA
  modified_base 24: mod_base = OTHER; note = 2-Prime-O-Methoxyethyl modified nucleoside
  modified_base 25: mod_base = OTHER; note = DNA nucleotide carrying a 6-amino-5-nitro-3-yl-2(1H)-pyridone nucleobase
  modified_base order(1,11,14,23,28,30): mod_base = OTHER; note = 2-Prime-Fluoro modified nucleoside
  modified_base order(2..10,12..13,15..22,27,29,31..32): mod_base = OTHER; note = 2-Prime-O-Methyl modified nucleoside
  modified_base order(1^2,31^32): mod_base = OTHER; note = (1,3-dimethylimidazolidin-2-ylidene) Phosphoramidate linkage
  modified_base order(2..26,27..31): mod_base = OTHER; note = Phosphorothioate linkage
  modified_base 26^27: mod_base = OTHER; note = Methylphosphonate linkage
  misc_feature 1..32: note = RM110146

SEQ ID NO: 355 - DNA, 23 bp, synthetic construct
  source 1..23: mol_type = other DNA
  misc_feature 18..19: note = DNA
  misc_feature order(1..17,20..23): note = RNA
  modified_base 17: mod_base = OTHER; note = 2-Prime-O-Methoxyethyl modified nucleoside
  modified_base 18: mod_base = OTHER; note = DNA nucleotide carrying a 6-amino-5-nitro-3-yl-2(1H)-pyridone nucleobase
  modified_base order(4,7,16,21): mod_base = OTHER; note = 2-Prime-Fluoro modified nucleoside
  modified_base order(1..3,5..6,8..15,20,22..23): mod_base = OTHER; note = 2-Prime-O-Methyl modified nucleoside
  modified_base order(1^2,22^23): mod_base = OTHER; note = (1,3-dimethylimidazolidin-2-ylidene) Phosphoramidate linkage
  modified_base order(2..19,20..22): mod_base = OTHER; note = Phosphorothioate linkage
  modified_base 19^20: mod_base = OTHER; note = Methylphosphonate linkage
  misc_feature 1..23: note = RM110147
ggtcaaacctctgaggantgggt

SEQ ID NO: 356 - DNA, 23 bp, synthetic construct
  source 1..23: mol_type = other DNA
  misc_feature 15..16: note = DNA
  misc_feature order(1..14,17..23): note = RNA
  modified_base 14: mod_base = OTHER; note = 2-Prime-O-Methoxyethyl modified nucleoside
  modified_base 15: mod_base = OTHER; note = DNA nucleotide carrying a 6-amino-5-nitro-3-yl-2(1H)-pyridone nucleobase
  modified_base order(1,4,13,18): mod_base = OTHER; note = 2-Prime-Fluoro modified nucleoside
  modified_base order(2..3,5..12,17,19..23): mod_base = OTHER; note = 2-Prime-O-Methyl modified nucleoside
  modified_base order(1^2,22^23): mod_base = OTHER; note = (1,3-dimethylimidazolidin-2-ylidene) Phosphoramidate linkage
  modified_base order(2..16,17..22): mod_base = OTHER; note = Phosphorothioate linkage
  modified_base 16^17: mod_base = OTHER; note = Methylphosphonate linkage
  misc_feature 1..23: note = RM110148
caaacctctgaggantgggttca

SEQ ID NO: 357 - DNA, 32 bp, synthetic construct; identical to SEQ ID NO: 127
  source 1..32: mol_type = other DNA
  misc_feature 28..29: note = DNA
  misc_feature order(1..27,30..32): note = RNA
  modified_base 27: mod_base = OTHER; note = 2-Prime-O-Methoxyethyl modified nucleoside
  modified_base 28: mod_base = OTHER; note = DNA nucleotide carrying a 6-amino-5-nitro-3-yl-2(1H)-pyridone nucleobase
  modified_base order(1,12..13,21,24,31): mod_base = OTHER; note = 2-Prime-Fluoro modified nucleoside
  modified_base order(2..11,14..20,22..23,25..26,30,32): mod_base = OTHER; note = 2-Prime-O-Methyl modified nucleoside
  modified_base order(1^2,31^32): mod_base = OTHER; note = (1,3-dimethylimidazolidin-2-ylidene) Phosphoramidate linkage
  modified_base order(2..29,30^31): mod_base = OTHER; note = Phosphorothioate linkage
  modified_base 29^30: mod_base = OTHER; note = Methylphosphonate linkage
  misc_feature 1..32: note = RM110149

SEQ ID NO: 358 - DNA, 23 bp, synthetic construct
  source 1..23: mol_type = other DNA
  misc_feature 18..19: note = DNA
  misc_feature order(1..17,20..23): note = RNA
  modified_base 17: mod_base = OTHER; note = 2-Prime-O-Methoxyethyl modified nucleoside
  modified_base 18: mod_base = OTHER; note = DNA nucleotide carrying a 6-amino-5-nitro-3-yl-2(1H)-pyridone nucleobase
  modified_base order(3,11,14,21): mod_base = OTHER; note = 2-Prime-Fluoro modified nucleoside
  modified_base order(1..2,4..10,12..13,15..16,20,22..23): mod_base = OTHER; note = 2-Prime-O-Methyl modified nucleoside
  modified_base order(1^2,22^23): mod_base = OTHER; note = (1,3-dimethylimidazolidin-2-ylidene) Phosphoramidate linkage
  modified_base order(2..19,20..22): mod_base = OTHER; note = Phosphorothioate linkage
  modified_base 19^20: mod_base = OTHER; note = Methylphosphonate linkage
  misc_feature 1..23: note = RM110150
ggtcaaacctctgaggantgggt

SEQ ID NO: 359 - DNA, 32 bp, synthetic construct; identical to SEQ ID NO: 131
  source 1..32: mol_type = other DNA
  misc_feature 16..17: note = DNA
  misc_feature order(1..15,18..32): note = RNA
  modified_base 15: mod_base = OTHER; note = 2-Prime-O-Methoxyethyl modified nucleoside
  modified_base 16: mod_base = OTHER; note = DNA nucleotide carrying a 6-amino-5-nitro-3-yl-2(1H)-pyridone nucleobase
  modified_base order(2,5..6,13,19..22,31): mod_base = OTHER; note = 2-Prime-Fluoro modified nucleoside
  modified_base order(1,3..4,7..12,14,18,23..30,32): mod_base = OTHER; note = 2-Prime-O-Methyl modified nucleoside
  modified_base order(1^2,31^32): mod_base = OTHER; note = (1,3-dimethylimidazolidin-2-ylidene) Phosphoramidate linkage
  modified_base order(2..17,18..31): mod_base = OTHER; note = Phosphorothioate linkage
  modified_base 17^18: mod_base = OTHER; note = Methylphosphonate linkage
  misc_feature 1..32: note = RM110151

SEQ ID NO: 360 - DNA, 32 bp, synthetic construct; identical to SEQ ID NO: 131
  source 1..32: mol_type = other DNA
  misc_feature 16..17: note = DNA
  misc_feature order(1..15,18..32): note = RNA
  modified_base 15: mod_base = OTHER; note = 2-Prime-O-Methoxyethyl modified nucleoside
  modified_base 16: mod_base = OTHER; note = DNA nucleotide carrying a 6-amino-5-nitro-3-yl-2(1H)-pyridone nucleobase
  modified_base order(3,12..14,19,21,28..29,32): mod_base = OTHER; note = 2-Prime-Fluoro modified nucleoside
  modified_base order(1..2,4..11,18,20,22..27,30..31): mod_base = OTHER; note = 2-Prime-O-Methyl modified nucleoside
  modified_base order(1^2,31^32): mod_base = OTHER; note = (1,3-dimethylimidazolidin-2-ylidene) Phosphoramidate linkage
  modified_base order(2..17,18..31): mod_base = OTHER; note = Phosphorothioate linkage
  modified_base 17^18: mod_base = OTHER; note = Methylphosphonate linkage
  misc_feature 1..32: note = RM110152

SEQ ID NO: 361 - DNA, 23 bp, synthetic construct
  source 1..23: mol_type = other DNA
  misc_feature 18..19: note = DNA
  misc_feature order(1..17,20..23): note = RNA
  modified_base 17: mod_base = OTHER; note = 2-Prime-O-Methoxyethyl modified nucleoside
  modified_base 18: mod_base = OTHER; note = DNA nucleotide carrying a 6-amino-5-nitro-3-yl-2(1H)-pyridone nucleobase
  modified_base order(7..8,15,21..23): mod_base = OTHER; note = 2-Prime-Fluoro modified nucleoside
  modified_base order(1..6,9..14,16,20): mod_base = OTHER; note = 2-Prime-O-Methyl modified nucleoside
  modified_base order(1^2,22^23): mod_base = OTHER; note = (1,3-dimethylimidazolidin-2-ylidene) Phosphoramidate linkage
  modified_base order(2..19,20..22): mod_base = OTHER; note = Phosphorothioate linkage
  modified_base 19^20: mod_base = OTHER; note = Methylphosphonate linkage
  misc_feature 1..23: note = RM110153
ggtcaaacctctgaggantgggt

SEQ ID NO: 362 - DNA, 23 bp, synthetic construct
  source 1..23: mol_type = other DNA
  misc_feature 15..16: note = DNA
  misc_feature order(1..14,17..23): note = RNA
  modified_base 14: mod_base = OTHER; note = 2-Prime-O-Methoxyethyl modified nucleoside
  modified_base 15: mod_base = OTHER; note = DNA nucleotide carrying a 6-amino-5-nitro-3-yl-2(1H)-pyridone nucleobase
  modified_base order(4..5,12,18..20): mod_base = OTHER; note = 2-Prime-Fluoro modified nucleoside
  modified_base order(1..3,6..11,13,17,21..23): mod_base = OTHER; note = 2-Prime-O-Methyl modified nucleoside
  modified_base order(1^2,22^23): mod_base = OTHER; note = (1,3-dimethylimidazolidin-2-ylidene) Phosphoramidate linkage
  modified_base order(2..16,17..22): mod_base = OTHER; note = Phosphorothioate linkage
  modified_base 16^17: mod_base = OTHER; note = Methylphosphonate linkage
  misc_feature 1..23: note = RM110154
caaacctctgaggantgggttca

SEQ ID NO: 363 - DNA, 23 bp, synthetic construct
  source 1..23: mol_type = other DNA
  misc_feature 12..13: note = DNA
  misc_feature order(1..11,14..23): note = RNA
  modified_base 11: mod_base = OTHER; note = 2-Prime-O-Methoxyethyl modified nucleoside
  modified_base 12: mod_base = OTHER; note = DNA nucleotide carrying a 6-amino-5-nitro-3-yl-2(1H)-pyridone nucleobase
  modified_base order(1..2,9,15..17): mod_base = OTHER; note = 2-Prime-Fluoro modified nucleoside
  modified_base order(3..8,10,14,18..23): mod_base = OTHER; note = 2-Prime-O-Methyl modified nucleoside
  modified_base order(1^2,22^23): mod_base = OTHER; note = (1,3-dimethylimidazolidin-2-ylidene) Phosphoramidate linkage
  modified_base order(2..13,14..22): mod_base = OTHER; note = Phosphorothioate linkage
  modified_base 13^14: mod_base = OTHER; note = Methylphosphonate linkage
  misc_feature 1..23: note = RM110155
acctctgaggantgggttcattt

SEQ ID NO: 364 - DNA, 32 bp, synthetic construct; identical to SEQ ID NO: 128
  source 1..32: mol_type = other DNA
  misc_feature 25..26: note = DNA
  misc_feature order(1..24,27..32): note = RNA
  modified_base 24: mod_base = OTHER; note = 2-Prime-O-Methoxyethyl modified nucleoside
  modified_base 25: mod_base = OTHER; note = DNA nucleotide carrying a 6-amino-5-nitro-3-yl-2(1H)-pyridone nucleobase
  modified_base order(14..15,22,28..30): mod_base = OTHER; note = 2-Prime-Fluoro modified nucleoside
  modified_base order(1..13,16..21,23,27,31..32): mod_base = OTHER; note = 2-Prime-O-Methyl modified nucleoside
  modified_base order(1^2,31^32): mod_base = OTHER; note = (1,3-dimethylimidazolidin-2-ylidene) Phosphoramidate linkage
  modified_base order(2..26,27..31): mod_base = OTHER; note = Phosphorothioate linkage
  modified_base 26^27: mod_base = OTHER; note = Methylphosphonate linkage
  misc_feature 1..32: note = RM110156

SEQ ID NO: 365 - DNA, 32 bp, synthetic construct; identical to SEQ ID NO: 129
  source 1..32: mol_type = other DNA
  misc_feature 22..23: note = DNA
  misc_feature order(1..21,24..32): note = RNA
  modified_base 21: mod_base = OTHER; note = 2-Prime-O-Methoxyethyl modified nucleoside
  modified_base 22: mod_base = OTHER; note = DNA nucleotide carrying a 6-amino-5-nitro-3-yl-2(1H)-pyridone nucleobase
  modified_base order(11..12,19,25..27): mod_base = OTHER; note = 2-Prime-Fluoro modified nucleoside
  modified_base order(1..10,13..18,20,24,28..32): mod_base = OTHER; note = 2-Prime-O-Methyl modified nucleoside
  modified_base order(1^2,31^32): mod_base = OTHER; note = (1,3-dimethylimidazolidin-2-ylidene) Phosphoramidate linkage
  modified_base order(2..23,24..31): mod_base = OTHER; note = Phosphorothioate linkage
  modified_base 23^24: mod_base = OTHER; note = Methylphosphonate linkage
  misc_feature 1..32: note = RM110157

SEQ ID NO: 366 - DNA, 32 bp, synthetic construct; identical to SEQ ID NO: 19
  source 1..32: mol_type = other DNA
  misc_feature 19..20: note = DNA
  misc_feature order(1..18,21..32): note = RNA
  modified_base 18: mod_base = OTHER; note = 2-Prime-O-Methoxyethyl modified nucleoside
  modified_base 19: mod_base = OTHER; note = DNA nucleotide carrying a 6-amino-5-nitro-3-yl-2(1H)-pyridone nucleobase
  modified_base order(8..9,16,22..24): mod_base = OTHER; note = 2-Prime-Fluoro modified nucleoside
  modified_base order(1..7,10..15,17,21,25..32): mod_base = OTHER; note = 2-Prime-O-Methyl modified nucleoside
  modified_base order(1^2,31^32): mod_base = OTHER; note = (1,3-dimethylimidazolidin-2-ylidene) Phosphoramidate linkage
  modified_base order(2..20,21..31): mod_base = OTHER; note = Phosphorothioate linkage
  modified_base 20^21: mod_base = OTHER; note = Methylphosphonate linkage
  misc_feature 1..32: note = RM110158

SEQ ID NO: 367 - DNA, 32 bp, synthetic construct; identical to SEQ ID NO: 131
  source 1..32: mol_type = other DNA
  misc_feature 16..17: note = DNA
  misc_feature order(1..15,18..32): note = RNA
  modified_base 15: mod_base = OTHER; note = 2-Prime-O-Methoxyethyl modified nucleoside
  modified_base 16: mod_base = OTHER; note = DNA nucleotide carrying a 6-amino-5-nitro-3-yl-2(1H)-pyridone nucleobase
  modified_base order(5..6,13,19..21): mod_base = OTHER; note = 2-Prime-Fluoro modified nucleoside
  modified_base order(1..4,7..12,14,18,22..32): mod_base = OTHER; note = 2-Prime-O-Methyl modified nucleoside
  modified_base order(1^2,31^32): mod_base = OTHER; note = (1,3-dimethylimidazolidin-2-ylidene) Phosphoramidate linkage
  modified_base order(2..17,18..31): mod_base = OTHER; note = Phosphorothioate linkage
  modified_base 17^18: mod_base = OTHER; note = Methylphosphonate linkage
  misc_feature 1..32: note = RM110159

SEQ ID NO: 368 - DNA, 32 bp, synthetic construct; identical to SEQ ID NO: 132
  source 1..32: mol_type = other DNA
  misc_feature 13..14: note = DNA
  misc_feature order(1..12,15..32): note = RNA
  modified_base 12: mod_base = OTHER; note = 2-Prime-O-Methoxyethyl modified nucleoside
  modified_base 13: mod_base = OTHER; note = DNA nucleotide carrying a 6-amino-5-nitro-3-yl-2(1H)-pyridone nucleobase
  modified_base order(2..3,10,16..18): mod_base = OTHER; note = 2-Prime-Fluoro modified nucleoside
  modified_base order(1,4..9,11,15,19..32): mod_base = OTHER; note = 2-Prime-O-Methyl modified nucleoside
  modified_base order(1^2,31^32): mod_base = OTHER; note = (1,3-dimethylimidazolidin-2-ylidene) Phosphoramidate linkage
  modified_base order(2..14,15..31): mod_base = OTHER; note = Phosphorothioate linkage
  modified_base 14^15: mod_base = OTHER; note = Methylphosphonate linkage
  misc_feature 1..32: note = RM110160

SEQ ID NO: 369 - DNA, 23 bp, synthetic construct
  source 1..23: mol_type = other DNA
  misc_feature 9..10: note = DNA
  misc_feature order(1..8,11..23): note = RNA
  modified_base 8: mod_base = OTHER; note = 2-Prime-O-Methoxyethyl modified nucleoside
  modified_base 9: mod_base = OTHER; note = DNA nucleotide carrying a 6-amino-5-nitro-3-yl-2(1H)-pyridone nucleobase
  modified_base order(6..7,12,14,21..22): mod_base = OTHER; note = 2-Prime-Fluoro modified nucleoside
  modified_base order(1..5,11,13,15..20,23): mod_base = OTHER; note = 2-Prime-O-Methyl modified nucleoside
  modified_base order(1^2,22^23): mod_base = OTHER; note = (1,3-dimethylimidazolidin-2-ylidene) Phosphoramidate linkage
  modified_base order(2..10,11..22): mod_base = OTHER; note = Phosphorothioate linkage
  modified_base 10^11: mod_base = OTHER; note = Methylphosphonate linkage
  misc_feature 1..23: note = RM110161
tctgaggantgggttcatttttc

SEQ ID NO: 370 - DNA, 23 bp, synthetic construct
  source 1..23: mol_type = other DNA
  misc_feature 6..7: note = DNA
  misc_feature order(1..5,8..23): note = RNA
  modified_base 5: mod_base = OTHER; note = 2-Prime-O-Methoxyethyl modified nucleoside
  modified_base 6: mod_base = OTHER; note = DNA nucleotide carrying a 6-amino-5-nitro-3-yl-2(1H)-pyridone nucleobase
  modified_base order(3..4,9,11,18..19): mod_base = OTHER; note = 2-Prime-Fluoro modified nucleoside
  modified_base order(1..2,8,10,12..17,20..23): mod_base = OTHER; note = 2-Prime-O-Methyl modified nucleoside
  modified_base order(1^2,22^23): mod_base = OTHER; note = (1,3-dimethylimidazolidin-2-ylidene) Phosphoramidate linkage
  modified_base order(2..7,8..22): mod_base = OTHER; note = Phosphorothioate linkage
  modified_base 7^8: mod_base = OTHER; note = Methylphosphonate linkage
  misc_feature 1..23: note = RM110162
gaggantgggttcatttttcttg

SEQ ID NO: 371 - DNA, 32 bp, synthetic construct; identical to SEQ ID NO: 19
  source 1..32: mol_type = other DNA
  misc_feature 19..20: note = DNA
  misc_feature order(1..18,21..32): note = RNA
  modified_base 18: mod_base = OTHER; note = 2-Prime-O-Methoxyethyl modified nucleoside
  modified_base 19: mod_base = OTHER; note = DNA nucleotide carrying a 6-amino-5-nitro-3-yl-2(1H)-pyridone nucleobase
  modified_base order(16..17,22,24,31..32): mod_base = OTHER; note = 2-Prime-Fluoro modified nucleoside
  modified_base order(1..15,21,23,25..30): mod_base = OTHER; note = 2-Prime-O-Methyl modified nucleoside
  modified_base order(1^2,31^32): mod_base = OTHER; note = (1,3-dimethylimidazolidin-2-ylidene) Phosphoramidate linkage
  modified_base order(2..20,21..31): mod_base = OTHER; note = Phosphorothioate linkage
  modified_base 20^21: mod_base = OTHER; note = Methylphosphonate linkage
  misc_feature 1..32: note = RM110163

SEQ ID NO: 372 - DNA, 32 bp, synthetic construct; identical to SEQ ID NO: 131
  source 1..32: mol_type = other DNA
  misc_feature 16..17: note = DNA
  misc_feature order(1..15,18..32): note = RNA
  modified_base 15: mod_base = OTHER; note = 2-Prime-O-Methoxyethyl modified nucleoside
  modified_base 16: mod_base = OTHER; note = DNA nucleotide carrying a 6-amino-5-nitro-3-yl-2(1H)-pyridone nucleobase
  modified_base order(13..14,19,21,28..29): mod_base = OTHER; note = 2-Prime-Fluoro modified nucleoside
  modified_base order(1..12,18,20,22..27,30..32): mod_base = OTHER; note = 2-Prime-O-Methyl modified nucleoside
  modified_base order(1^2,31^32): mod_base = OTHER; note = (1,3-dimethylimidazolidin-2-ylidene) Phosphoramidate linkage
  modified_base order(2..17,18..31): mod_base = OTHER; note = Phosphorothioate linkage
  modified_base 17^18: mod_base = OTHER; note = Methylphosphonate linkage
  misc_feature 1..32: note = RM110164

SEQ ID NO: 373 - DNA, 32 bp, synthetic construct; identical to SEQ ID NO: 132
  source 1..32: mol_type = other DNA
  misc_feature 13..14: note = DNA
  misc_feature order(1..12,15..32): note = RNA
  modified_base 12: mod_base = OTHER; note = 2-Prime-O-Methoxyethyl modified nucleoside
  modified_base 13: mod_base = OTHER; note = DNA nucleotide carrying a 6-amino-5-nitro-3-yl-2(1H)-pyridone nucleobase
  modified_base order(10..11,16,18,25..26): mod_base = OTHER; note = 2-Prime-Fluoro modified nucleoside
  modified_base order(1..9,15,17,19..24,27..32): mod_base = OTHER; note = 2-Prime-O-Methyl modified nucleoside
  modified_base order(1^2,31^32): mod_base = OTHER; note = (1,3-dimethylimidazolidin-2-ylidene) Phosphoramidate linkage
  modified_base order(2..14,15..31): mod_base = OTHER; note = Phosphorothioate linkage
  modified_base 14^15: mod_base = OTHER; note = Methylphosphonate linkage
  misc_feature 1..32: note = RM110165

SEQ ID NO: 374 - DNA, 32 bp, synthetic construct; identical to SEQ ID NO: 133
  source 1..32: mol_type = other DNA
  misc_feature 10..11: note = DNA
  misc_feature order(1..9,12..32): note = RNA
  modified_base 9: mod_base = OTHER; note = 2-Prime-O-Methoxyethyl modified nucleoside
  modified_base 10: mod_base = OTHER; note = DNA nucleotide carrying a 6-amino-5-nitro-3-yl-2(1H)-pyridone nucleobase
  modified_base order(7..8,13,15,22..23): mod_base = OTHER; note = 2-Prime-Fluoro modified nucleoside
  modified_base order(1..6,12,14,16..21,24..32): mod_base = OTHER; note = 2-Prime-O-Methyl modified nucleoside
  modified_base order(1^2,31^32): mod_base = OTHER; note = (1,3-dimethylimidazolidin-2-ylidene) Phosphoramidate linkage
  modified_base order(2..11,12..31): mod_base = OTHER; note = Phosphorothioate linkage
  modified_base 11^12: mod_base = OTHER; note = Methylphosphonate linkage
  misc_feature 1..32: note = RM110166

SEQ ID NO: 375 - DNA, 32 bp, synthetic construct; identical to SEQ ID NO: 134
  source 1..32: mol_type = other DNA
  misc_feature 7..8: note = DNA
  misc_feature order(1..6,9..32): note = RNA
  modified_base 6: mod_base = OTHER; note = 2-Prime-O-Methoxyethyl modified nucleoside
  modified_base 7: mod_base = OTHER; note = DNA nucleotide carrying a 6-amino-5-nitro-3-yl-2(1H)-pyridone nucleobase
  modified_base order(4..5,10,12,19..20): mod_base = OTHER; note = 2-Prime-Fluoro modified nucleoside
  modified_base order(1..3,9,11,13..18,21..32): mod_base = OTHER; note = 2-Prime-O-Methyl modified nucleoside
  modified_base order(1^2,31^32): mod_base = OTHER; note = (1,3-dimethylimidazolidin-2-ylidene) Phosphoramidate linkage
  modified_base order(2..8,9..31): mod_base = OTHER; note = Phosphorothioate linkage
  modified_base 8^9: mod_base = OTHER; note = Methylphosphonate linkage
  misc_feature 1..32: note = RM110167

SEQ ID NO: 376 - DNA, 32 bp, synthetic construct; identical to SEQ ID NO: 127
  source 1..32: mol_type = other DNA
  misc_feature 28..29: note = DNA
  misc_feature order(1..27,30..32): note = RNA
  modified_base 27: mod_base = OTHER; note = 2-Prime-O-Methoxyethyl modified nucleoside
  modified_base 28: mod_base = OTHER; note = DNA nucleotide carrying a 6-amino-5-nitro-3-yl-2(1H)-pyridone nucleobase
  modified_base order(25,31..32): mod_base = OTHER; note = 2-Prime-Fluoro modified nucleoside
  modified_base order(1..24,26,30): mod_base = OTHER; note = 2-Prime-O-Methyl modified nucleoside
  modified_base order(1^2,31^32): mod_base = OTHER; note = (1,3-dimethylimidazolidin-2-ylidene) Phosphoramidate linkage
  modified_base order(2..29,30^31): mod_base = OTHER; note = Phosphorothioate linkage
  modified_base 29^30: mod_base = OTHER; note = Methylphosphonate linkage
  misc_feature 1..32: note = RM110168

SEQ ID NO: 377 - DNA, 32 bp, synthetic construct; identical to SEQ ID NO: 128
  source 1..32: mol_type = other DNA
  misc_feature 25..26: note = DNA
  misc_feature order(1..24,27..32): note = RNA
  modified_base 24: mod_base = OTHER; note = 2-Prime-O-Methoxyethyl modified nucleoside
  modified_base 25: mod_base = OTHER; note = DNA nucleotide carrying a 6-amino-5-nitro-3-yl-2(1H)-pyridone nucleobase
  modified_base order(22,28..29): mod_base = OTHER; note = 2-Prime-Fluoro modified nucleoside
  modified_base order(1..21,23,27,30..32): mod_base = OTHER; note = 2-Prime-O-Methyl modified nucleoside
  modified_base order(1^2,31^32): mod_base = OTHER; note = (1,3-dimethylimidazolidin-2-ylidene) Phosphoramidate linkage
  modified_base order(2..26,27..31): mod_base = OTHER; note = Phosphorothioate linkage
  modified_base 26^27: mod_base = OTHER; note = Methylphosphonate linkage
  misc_feature 1..32: note = RM110169

SEQ ID NO: 378 - DNA, 32 bp, synthetic construct; identical to SEQ ID NO: 129
  source 1..32: mol_type = other DNA
  misc_feature 22..23: note = DNA
  misc_feature order(1..21,24..32): note = RNA
  modified_base 21: mod_base = OTHER; note = 2-Prime-O-Methoxyethyl modified nucleoside
  modified_base 22: mod_base = OTHER; note = DNA nucleotide carrying a 6-amino-5-nitro-3-yl-2(1H)-pyridone nucleobase
  modified_base order(19,25..26): mod_base = OTHER; note = 2-Prime-Fluoro modified nucleoside
  modified_base order(1..18,20,24,27..32): mod_base = OTHER; note = 2-Prime-O-Methyl modified nucleoside
  modified_base order(1^2,31^32): mod_base = OTHER; note = (1,3-dimethylimidazolidin-2-ylidene) Phosphoramidate linkage
  modified_base order(2..23,24..31): mod_base = OTHER; note = Phosphorothioate linkage
  modified_base 23^24: mod_base = OTHER; note = Methylphosphonate linkage
  misc_feature 1..32: note = RM110170

SEQ ID NO: 379 - DNA, 32 bp, synthetic construct; identical to SEQ ID NO: 19
  source 1..32: mol_type = other DNA
  misc_feature 19..20: note = DNA
  misc_feature order(1..18,21..32): note = RNA
  modified_base 18: mod_base = OTHER; note = 2-Prime-O-Methoxyethyl modified nucleoside
  modified_base 19: mod_base = OTHER; note = DNA nucleotide carrying a 6-amino-5-nitro-3-yl-2(1H)-pyridone nucleobase
  modified_base order(16,22..23): mod_base = OTHER; note = 2-Prime-Fluoro modified nucleoside
  modified_base order(1..15,17,21,24..32): mod_base = OTHER; note = 2-Prime-O-Methyl modified nucleoside
  modified_base order(1^2,31^32): mod_base = OTHER; note = (1,3-dimethylimidazolidin-2-ylidene) Phosphoramidate linkage
  modified_base order(2..20,21..31): mod_base = OTHER; note = Phosphorothioate linkage
  modified_base 20^21: mod_base = OTHER; note = Methylphosphonate linkage
  misc_feature 1..32: note = RM110171

SEQ ID NO: 380 - DNA, 32 bp, synthetic construct; identical to SEQ ID NO: 131
  source 1..32: mol_type = other DNA
  misc_feature 16..17: note = DNA
  misc_feature order(1..15,18..32): note = RNA
  modified_base 15: mod_base = OTHER; note = 2-Prime-O-Methoxyethyl modified nucleoside
  modified_base 16: mod_base = OTHER; note = DNA nucleotide carrying a 6-amino-5-nitro-3-yl-2(1H)-pyridone nucleobase
  modified_base order(13,19..20): mod_base = OTHER; note = 2-Prime-Fluoro modified nucleoside
  modified_base order(1..12,14,18,21..32): mod_base = OTHER; note = 2-Prime-O-Methyl modified nucleoside
  modified_base order(1^2,31^32): mod_base = OTHER; note = (1,3-dimethylimidazolidin-2-ylidene) Phosphoramidate linkage
  modified_base order(2..17,18..31): mod_base = OTHER; note = Phosphorothioate linkage
  modified_base 17^18: mod_base = OTHER; note = Methylphosphonate linkage
  misc_feature 1..32: note = RM110172

SEQ ID NO: 381 - DNA, 32 bp, synthetic construct; identical to SEQ ID NO: 132
  source 1..32: mol_type = other DNA
  misc_feature 13..14: note = DNA
  misc_feature order(1..12,15..32): note = RNA
  modified_base 12: mod_base = OTHER; note = 2-Prime-O-Methoxyethyl modified nucleoside
  modified_base 13: mod_base = OTHER; note = DNA nucleotide carrying a 6-amino-5-nitro-3-yl-2(1H)-pyridone nucleobase
  modified_base order(10,16..17): mod_base = OTHER; note = 2-Prime-Fluoro modified nucleoside
  modified_base order(1..9,11,15,18..32): mod_base = OTHER; note = 2-Prime-O-Methyl modified nucleoside
  modified_base order(1^2,31^32): mod_base = OTHER; note = (1,3-dimethylimidazolidin-2-ylidene) Phosphoramidate linkage
  modified_base order(2..14,15..31): mod_base = OTHER; note = Phosphorothioate linkage
  modified_base 14^15: mod_base = OTHER; note = Methylphosphonate linkage
  misc_feature 1..32: note = RM110173

SEQ ID NO: 382 - DNA, 32 bp, synthetic construct; identical to SEQ ID NO: 133
  source 1..32: mol_type = other DNA
  misc_feature 10..11: note = DNA
  misc_feature order(1..9,12..32): note = RNA
  modified_base 9: mod_base = OTHER; note = 2-Prime-O-Methoxyethyl modified nucleoside
  modified_base 10: mod_base = OTHER; note = DNA nucleotide carrying a 6-amino-5-nitro-3-yl-2(1H)-pyridone nucleobase
  modified_base order(7,13..14): mod_base = OTHER; note = 2-Prime-Fluoro modified nucleoside
  modified_base order(1..6,8,12,15..32): mod_base = OTHER; note = 2-Prime-O-Methyl modified nucleoside
  modified_base order(1^2,31^32): mod_base = OTHER; note = (1,3-dimethylimidazolidin-2-ylidene) Phosphoramidate linkage
  modified_base order(2..11,12..31): mod_base = OTHER; note = Phosphorothioate linkage
  modified_base 11^12: mod_base = OTHER; note = Methylphosphonate linkage
  misc_feature 1..32: note = RM110174

SEQ ID NO: 383 - DNA, 32 bp, synthetic construct; identical to SEQ ID NO: 134
  source 1..32: mol_type = other DNA
  misc_feature 7..8: note = DNA
  misc_feature order(1..6,9..32): note = RNA
  modified_base 6: mod_base = OTHER; note = 2-Prime-O-Methoxyethyl modified nucleoside
  modified_base 7: mod_base = OTHER; note = DNA nucleotide carrying a 6-amino-5-nitro-3-yl-2(1H)-pyridone nucleobase
  modified_base order(4,10..11): mod_base = OTHER; note = 2-Prime-Fluoro modified nucleoside
  modified_base order(1..3,5,9,12..32): mod_base = OTHER; note = 2-Prime-O-Methyl modified nucleoside
  modified_base order(1^2,31^32): mod_base = OTHER; note = (1,3-dimethylimidazolidin-2-ylidene) Phosphoramidate linkage
  modified_base order(2..8,9..31): mod_base = OTHER; note = Phosphorothioate linkage
  modified_base 8^9: mod_base = OTHER; note = Methylphosphonate linkage
  misc_feature 1..32: note = RM110175

SEQ ID NO: 384 - DNA, 32 bp, synthetic construct; identical to SEQ ID NO: 128
  source 1..32: mol_type = other DNA
  misc_feature 25..26: note = DNA
  misc_feature order(1..24,27..32): note = RNA
  modified_base 24: mod_base = OTHER; note = 2-Prime-O-Methoxyethyl modified nucleoside
  modified_base 25: mod_base = OTHER; note = DNA nucleotide carrying a 6-amino-5-nitro-3-yl-2(1H)-pyridone nucleobase
  modified_base order(23,28,30): mod_base = OTHER; note = 2-Prime-Fluoro modified nucleoside
  modified_base order(1..22,27,29,31..32): mod_base = OTHER; note = 2-Prime-O-Methyl modified nucleoside
  modified_base order(1^2,31^32): mod_base = OTHER; note = (1,3-dimethylimidazolidin-2-ylidene) Phosphoramidate linkage
  modified_base order(2..26,27..31): mod_base = OTHER; note = Phosphorothioate linkage
  modified_base 26^27: mod_base = OTHER; note = Methylphosphonate linkage
  misc_feature 1..32: note = RM110176

SEQ ID NO: 385 - DNA, 32 bp, synthetic construct; identical to SEQ ID NO: 129
  source 1..32: mol_type = other DNA
  misc_feature 22..23: note = DNA
  misc_feature order(1..21,24..32): note = RNA
  modified_base 21: mod_base = OTHER; note = 2-Prime-O-Methoxyethyl modified nucleoside
  modified_base 22: mod_base = OTHER; note = DNA nucleotide carrying a 6-amino-5-nitro-3-yl-2(1H)-pyridone nucleobase
  modified_base order(20,25,27): mod_base = OTHER; note = 2-Prime-Fluoro modified nucleoside
  modified_base order(1..19,24,26,28..32): mod_base = OTHER; note = 2-Prime-O-Methyl modified nucleoside
  modified_base order(1^2,31^32): mod_base = OTHER; note = (1,3-dimethylimidazolidin-2-ylidene) Phosphoramidate linkage
  modified_base order(2..23,24..31): mod_base = OTHER; note = Phosphorothioate linkage
  modified_base 23^24: mod_base = OTHER; note = Methylphosphonate linkage
  misc_feature 1..32: note = RM110177

SEQ ID NO: 386 - DNA, 32 bp, synthetic construct; identical to SEQ ID NO: 19
  source 1..32: mol_type = other DNA
  misc_feature 19..20: note = DNA
  misc_feature order(1..18,21..32): note = RNA
  modified_base 18: mod_base = OTHER; note = 2-Prime-O-Methoxyethyl modified nucleoside
  modified_base 19: mod_base = OTHER; note = DNA nucleotide carrying a 6-amino-5-nitro-3-yl-2(1H)-pyridone nucleobase
  modified_base order(17,22,24): mod_base = OTHER; note = 2-Prime-Fluoro modified nucleoside
  modified_base order(1..16,21,23,25..32): mod_base = OTHER; note = 2-Prime-O-Methyl modified nucleoside
  modified_base order(1^2,31^32): mod_base = OTHER; note = (1,3-dimethylimidazolidin-2-ylidene) Phosphoramidate linkage
  modified_base order(2..20,21..31): mod_base = OTHER; note = Phosphorothioate linkage
  modified_base 20^21: mod_base = OTHER; note = Methylphosphonate linkage
  misc_feature 1..32: note = RM110178

SEQ ID NO: 387 - DNA, 32 bp, synthetic construct; identical to SEQ ID NO: 131
  source 1..32: mol_type = other DNA
  misc_feature 16..17: note = DNA
  misc_feature order(1..15,18..32): note = RNA
  modified_base 15: mod_base = OTHER; note = 2-Prime-O-Methoxyethyl modified nucleoside
  modified_base 16: mod_base = OTHER; note = DNA nucleotide carrying a 6-amino-5-nitro-3-yl-2(1H)-pyridone nucleobase
  modified_base order(14,19,21): mod_base = OTHER; note = 2-Prime-Fluoro modified nucleoside
  modified_base order(1..13,18,20,22..32): mod_base = OTHER; note = 2-Prime-O-Methyl modified nucleoside
  modified_base order(1^2,31^32): mod_base = OTHER; note = (1,3-dimethylimidazolidin-2-ylidene) Phosphoramidate linkage
  modified_base order(2..17,18..31): mod_base = OTHER; note = Phosphorothioate linkage
  modified_base 17^18: mod_base = OTHER; note = Methylphosphonate linkage
  misc_feature 1..32: note = RM110179

SEQ ID NO: 388 - DNA, 32 bp, synthetic construct; identical to SEQ ID NO: 132
  source 1..32: mol_type = other DNA
  misc_feature 13..14: note = DNA
  misc_feature order(1..12,15..32): note = RNA
  modified_base 12: mod_base = OTHER; note = 2-Prime-O-Methoxyethyl modified nucleoside
  modified_base 13: mod_base = OTHER; note = DNA nucleotide carrying a 6-amino-5-nitro-3-yl-2(1H)-pyridone nucleobase
  modified_base order(11,16,18): mod_base = OTHER; note = 2-Prime-Fluoro modified nucleoside
  modified_base order(1..10,15,17,19..32): mod_base = OTHER; note = 2-Prime-O-Methyl modified nucleoside
  modified_base order(1^2,31^32): mod_base = OTHER; note = (1,3-dimethylimidazolidin-2-ylidene) Phosphoramidate linkage
  modified_base order(2..14,15..31): mod_base = OTHER; note = Phosphorothioate linkage
  modified_base 14^15: mod_base = OTHER; note = Methylphosphonate linkage
  misc_feature 1..32: note = RM110180

SEQ ID NO: 389 - DNA, 32 bp, synthetic construct; identical to SEQ ID NO: 133
  source 1..32: mol_type = other DNA
  misc_feature 10..11: note = DNA
  misc_feature order(1..9,12..32): note = RNA
  modified_base 9: mod_base = OTHER; note = 2-Prime-O-Methoxyethyl modified nucleoside
  modified_base 10: mod_base = OTHER; note = DNA nucleotide carrying a 6-amino-5-nitro-3-yl-2(1H)-pyridone nucleobase
  modified_base order(8,13,15): mod_base = OTHER; note = 2-Prime-Fluoro modified nucleoside
  modified_base order(1..7,12,14,16..32): mod_base = OTHER; note = 2-Prime-O-Methyl modified nucleoside
  modified_base order(1^2,31^32): mod_base = OTHER; note = (1,3-dimethylimidazolidin-2-ylidene) Phosphoramidate linkage
  modified_base order(2..11,12..31): mod_base = OTHER; note = Phosphorothioate linkage
  modified_base 11^12: mod_base = OTHER; note = Methylphosphonate linkage
  misc_feature 1..32: note = RM110181

SEQ ID NO: 390 - DNA, 32 bp, synthetic construct; identical to SEQ ID NO: 134
  source 1..32: mol_type = other DNA
  misc_feature 7..8: note = DNA
  misc_feature order(1..6,9..32): note = RNA
  modified_base 6: mod_base = OTHER; note = 2-Prime-O-Methoxyethyl modified nucleoside
  modified_base 7: mod_base = OTHER; note = DNA nucleotide carrying a 6-amino-5-nitro-3-yl-2(1H)-pyridone nucleobase
  modified_base order(5,10,12): mod_base = OTHER; note = 2-Prime-Fluoro modified nucleoside
  modified_base order(1..4,9,11,13..32): mod_base = OTHER; note = 2-Prime-O-Methyl modified nucleoside
  modified_base order(1^2,31^32): mod_base = OTHER; note = (1,3-dimethylimidazolidin-2-ylidene) Phosphoramidate linkage
  modified_base order(2..8,9..31): mod_base = OTHER; note = Phosphorothioate linkage
  modified_base 8^9: mod_base = OTHER; note = Methylphosphonate linkage
  misc_feature 1..32: note = RM110182

SEQ ID NO: 391 - DNA, 32 bp, synthetic construct; identical to SEQ ID NO: 134
  source 1..32: mol_type = other DNA
  misc_feature 7..8: note = DNA
  misc_feature order(1..6,9..32): note = RNA
  modified_base 6: mod_base = OTHER; note = 2-Prime-O-Methoxyethyl modified nucleoside
  modified_base 7: mod_base = OTHER; note = DNA nucleotide carrying a 6-amino-5-nitro-3-yl-2(1H)-pyridone nucleobase
  modified_base order(1,3,10,12,17..18,21,26,30): mod_base = OTHER; note = 2-Prime-Fluoro modified nucleoside
  modified_base order(2,4..5,9,11,13..16,19..20,22..25,27..29,31..32): mod_base = OTHER; note = 2-Prime-O-Methyl modified nucleoside
  modified_base order(1^2,31^32): mod_base = OTHER; note = (1,3-dimethylimidazolidin-2-ylidene) Phosphoramidate linkage
  modified_base order(2..8,9..31): mod_base = OTHER; note = Phosphorothioate linkage
  modified_base 8^9: mod_base = OTHER; note = Methylphosphonate linkage
  misc_feature 1..32: note = RM110183

SEQ ID NO: 392 - DNA, 32 bp, synthetic construct; identical to SEQ ID NO: 129
  source 1..32: mol_type = other DNA
  misc_feature 22..23: note = DNA
  misc_feature order(1..21,24..32): note = RNA
  modified_base 21: mod_base = OTHER; note = 2-Prime-O-Methoxyethyl modified nucleoside
  modified_base 22: mod_base = OTHER; note = DNA nucleotide carrying a 6-amino-5-nitro-3-yl-2(1H)-pyridone nucleobase
  modified_base order(1,5,10,13..14,19,25,28,30): mod_base = OTHER; note = 2-Prime-Fluoro modified nucleoside
  modified_base order(2..4,6..9,11..12,15..18,20,24,26..27,29,31..32): mod_base = OTHER; note = 2-Prime-O-Methyl modified nucleoside
  modified_base order(1^2,31^32): mod_base = OTHER; note = (1,3-dimethylimidazolidin-2-ylidene) Phosphoramidate linkage
  modified_base order(2..23,24..31): mod_base = OTHER; note = Phosphorothioate linkage
  modified_base 23^24: mod_base = OTHER; note = Methylphosphonate linkage
  misc_feature 1..32: note = RM110184

SEQ ID NO: 393 - DNA, 23 bp, synthetic construct
  source 1..23: mol_type = other DNA
  misc_feature 12..13: note = DNA
  misc_feature order(1..11,14..23): note = RNA
  modified_base 11: mod_base = OTHER; note = 2-Prime-O-Methoxyethyl modified nucleoside
  modified_base 12: mod_base = OTHER; note = DNA nucleotide carrying a 6-amino-5-nitro-3-yl-2(1H)-pyridone nucleobase
  modified_base order(6,8,15,17,22..23): mod_base = OTHER; note = 2-Prime-Fluoro modified nucleoside
  modified_base order(1..5,7,9..10,14,16,18..21): mod_base = OTHER; note = 2-Prime-O-Methyl modified nucleoside
  modified_base order(1^2,22^23): mod_base = OTHER; note = (1,3-dimethylimidazolidin-2-ylidene) Phosphoramidate linkage
  modified_base order(2..13,14..22): mod_base = OTHER; note = Phosphorothioate linkage
  modified_base 13^14: mod_base = OTHER; note = Methylphosphonate linkage
  misc_feature 1..23: note = RM110185
acctctgaggantgggttcattt

SEQ ID NO: 394 - DNA, 23 bp, synthetic construct
  source 1..23: mol_type = other DNA
  misc_feature 9..10: note = DNA
  misc_feature order(1..8,11..23): note = RNA
  modified_base 8: mod_base = OTHER; note = 2-Prime-O-Methoxyethyl modified nucleoside
  modified_base 9: mod_base = OTHER; note = DNA nucleotide carrying a 6-amino-5-nitro-3-yl-2(1H)-pyridone nucleobase
  modified_base order(3,5,12,14,19..20): mod_base = OTHER; note = 2-Prime-Fluoro modified nucleoside
  modified_base order(1..2,4,6..7,11,13,15..18,21..23): mod_base = OTHER; note = 2-Prime-O-Methyl modified nucleoside
  modified_base order(1^2,22^23): mod_base = OTHER; note = (1,3-dimethylimidazolidin-2-ylidene) Phosphoramidate linkage
  modified_base order(2..10,11..22): mod_base = OTHER; note = Phosphorothioate linkage
  modified_base 10^11: mod_base = OTHER; note = Methylphosphonate linkage
  misc_feature 1..23: note = RM110186
tctgaggantgggttcatttttc

SEQ ID NO: 395 - DNA, 32 bp, synthetic construct; identical to SEQ ID NO: 19
  source 1..32: mol_type = other DNA
  misc_feature 19..20: note = DNA
  misc_feature order(1..18,21..32): note = RNA
  modified_base 18: mod_base = OTHER; note = 2-Prime-O-Methoxyethyl modified nucleoside
  modified_base 19: mod_base = OTHER; note = DNA nucleotide carrying a 6-amino-5-nitro-3-yl-2(1H)-pyridone nucleobase
  modified_base order(13,15,22,24,29..30): mod_base = OTHER; note = 2-Prime-Fluoro modified nucleoside
  modified_base order(1..12,14,16..17,21,23,25..28,31..32): mod_base = OTHER; note = 2-Prime-O-Methyl modified nucleoside
  modified_base order(1^2,31^32): mod_base = OTHER; note = (1,3-dimethylimidazolidin-2-ylidene) Phosphoramidate linkage
  modified_base order(2..20,21..31): mod_base = OTHER; note = Phosphorothioate linkage
  modified_base 20^21: mod_base = OTHER; note = Methylphosphonate linkage
  misc_feature 1..32: note = RM110187

SEQ ID NO: 396 - DNA, 32 bp, synthetic construct; identical to SEQ ID NO: 131
  source 1..32: mol_type = other DNA
  misc_feature 16..17: note = DNA
  misc_feature order(1..15,18..32): note = RNA
  modified_base 15: mod_base = OTHER; note = 2-Prime-O-Methoxyethyl modified nucleoside
  modified_base 16: mod_base = OTHER; note = DNA nucleotide carrying a 6-amino-5-nitro-3-yl-2(1H)-pyridone nucleobase
  modified_base order(10,12,19,21,26..27): mod_base = OTHER; note = 2-Prime-Fluoro modified nucleoside
  modified_base order(1..9,11,13..14,18,20,22..25,28..32): mod_base = OTHER; note = 2-Prime-O-Methyl modified nucleoside
  modified_base order(1^2,31^32): mod_base = OTHER; note = (1,3-dimethylimidazolidin-2-ylidene) Phosphoramidate linkage
  modified_base order(2..17,18..31): mod_base = OTHER; note = Phosphorothioate linkage
  modified_base 17^18: mod_base = OTHER; note = Methylphosphonate linkage
  misc_feature 1..32: note = RM110188

SEQ ID NO: 397 - DNA, 32 bp, synthetic construct; identical to SEQ ID NO: 132
  source 1..32: mol_type = other DNA
  misc_feature 13..14: note = DNA
  misc_feature order(1..12,15..32): note = RNA
  modified_base 12: mod_base = OTHER; note = 2-Prime-O-Methoxyethyl modified nucleoside
  modified_base 13: mod_base = OTHER; note = DNA nucleotide carrying a 6-amino-5-nitro-3-yl-2(1H)-pyridone nucleobase
  modified_base order(7,9,16,18,23..24): mod_base = OTHER; note = 2-Prime-Fluoro modified nucleoside
  modified_base order(1..6,8,10..11,15,17,19..22,25..32): mod_base = OTHER; note = 2-Prime-O-Methyl modified nucleoside
  modified_base order(1^2,31^32): mod_base = OTHER; note = (1,3-dimethylimidazolidin-2-ylidene) Phosphoramidate linkage
  modified_base order(2..14,15..31): mod_base = OTHER; note = Phosphorothioate linkage
  modified_base 14^15: mod_base = OTHER; note = Methylphosphonate linkage
  misc_feature 1..32: note = RM110189

SEQ ID NO: 398 - DNA, 32 bp, synthetic construct; identical to SEQ ID NO: 133
  source 1..32: mol_type = other DNA
  misc_feature 10..11: note = DNA
  misc_feature order(1..9,12..32): note = RNA
  modified_base 9: mod_base = OTHER; note = 2-Prime-O-Methoxyethyl modified nucleoside
  modified_base 10: mod_base = OTHER; note = DNA nucleotide carrying a 6-amino-5-nitro-3-yl-2(1H)-pyridone nucleobase
  modified_base order(4,6,13,15,20..21): mod_base = OTHER; note = 2-Prime-Fluoro modified nucleoside
  modified_base order(1..3,5,7..8,12,14,16..19,22..32): mod_base = OTHER; note = 2-Prime-O-Methyl modified nucleoside
  modified_base order(1^2,31^32): mod_base = OTHER; note = (1,3-dimethylimidazolidin-2-ylidene) Phosphoramidate linkage
  modified_base order(2..11,12..31): mod_base = OTHER; note = Phosphorothioate linkage
  modified_base 11^12: mod_base = OTHER; note = Methylphosphonate linkage
  misc_feature 1..32: note = RM110190

SEQ ID NO: 399 - DNA, 32 bp, synthetic construct; identical to SEQ ID NO: 134
  source 1..32: mol_type = other DNA
  misc_feature 7..8: note = DNA
  misc_feature order(1..6,9..32): note = RNA
  modified_base 6: mod_base = OTHER; note = 2-Prime-O-Methoxyethyl modified nucleoside
  modified_base 7: mod_base = OTHER; note = DNA nucleotide carrying a 6-amino-5-nitro-3-yl-2(1H)-pyridone nucleobase
  modified_base order(1,3,10,12,17..18): mod_base = OTHER; note = 2-Prime-Fluoro modified nucleoside
  modified_base order(2,4..5,9,11,13..16,19..32): mod_base = OTHER; note = 2-Prime-O-Methyl modified nucleoside
  modified_base order(1^2,31^32): mod_base = OTHER; note = (1,3-dimethylimidazolidin-2-ylidene) Phosphoramidate linkage
  modified_base order(2..8,9..31): mod_base = OTHER; note = Phosphorothioate linkage
  modified_base 8^9: mod_base = OTHER; note = Methylphosphonate linkage
  misc_feature 1..32: note = RM110191

SEQ ID NO: 400 - DNA, 23 bp, synthetic construct
  source 1..23: mol_type = other DNA
  misc_feature 15..16: note = DNA
  misc_feature order(1..14,17..23): note = RNA
  modified_base 14: mod_base = OTHER; note = 2-Prime-O-Methoxyethyl modified nucleoside
  modified_base 15: mod_base = OTHER; note = DNA nucleotide carrying a 6-amino-5-nitro-3-yl-2(1H)-pyridone nucleobase
  modified_base order(6..7,12,18,21,23): mod_base = OTHER; note = 2-Prime-Fluoro modified nucleoside
  modified_base order(1..5,8..11,13,17,19..20,22): mod_base = OTHER; note = 2-Prime-O-Methyl modified nucleoside
  modified_base order(1^2,22^23): mod_base = OTHER; note = (1,3-dimethylimidazolidin-2-ylidene) Phosphoramidate linkage
  modified_base order(2..16,17..22): mod_base = OTHER; note = Phosphorothioate linkage
  modified_base 16^17: mod_base = OTHER; note = Methylphosphonate linkage
  misc_feature 1..23: note = RM110192
caaacctctgaggantgggttca

SEQ ID NO: 401 - DNA, 23 bp, synthetic construct
  source 1..23: mol_type = other DNA
  misc_feature 12..13: note = DNA
  misc_feature order(1..11,14..23): note = RNA
  modified_base 11: mod_base = OTHER; note = 2-Prime-O-Methoxyethyl modified nucleoside
  modified_base 12: mod_base = OTHER; note = DNA nucleotide carrying a 6-amino-5-nitro-3-yl-2(1H)-pyridone nucleobase
  modified_base order(3..4,9,15,18,20): mod_base = OTHER; note = 2-Prime-Fluoro modified nucleoside
  modified_base order(1..2,5..8,10,14,16..17,19,21..23): mod_base = OTHER; note = 2-Prime-O-Methyl modified nucleoside
  modified_base order(1^2,22^23): mod_base = OTHER; note = (1,3-dimethylimidazolidin-2-ylidene) Phosphoramidate linkage
  modified_base order(2..13,14..22): mod_base = OTHER; note = Phosphorothioate linkage
  modified_base 13^14: mod_base = OTHER; note = Methylphosphonate linkage
  misc_feature 1..23: note = RM110193
acctctgaggantgggttcattt

SEQ ID NO: 402 - DNA, 32 bp, synthetic construct; identical to SEQ ID NO: 129
  source 1..32: mol_type = other DNA
  misc_feature 22..23: note = DNA
  misc_feature order(1..21,24..32): note = RNA
  modified_base 21: mod_base = OTHER; note = 2-Prime-O-Methoxyethyl modified nucleoside
  modified_base 22: mod_base = OTHER; note = DNA nucleotide carrying a 6-amino-5-nitro-3-yl-2(1H)-pyridone nucleobase
  modified_base order(13..14,19,25,28,30): mod_base = OTHER; note = 2-Prime-Fluoro modified nucleoside
  modified_base order(1..12,15..18,20,24,26..27,29,31..32): mod_base = OTHER; note = 2-Prime-O-Methyl modified nucleoside
  modified_base order(1^2,31^32): mod_base = OTHER; note = (1,3-dimethylimidazolidin-2-ylidene) Phosphoramidate linkage
  modified_base order(2..23,24..31): mod_base = OTHER; note = Phosphorothioate linkage
  modified_base 23^24: mod_base = OTHER; note = Methylphosphonate linkage
  misc_feature 1..32: note = RM110194

SEQ ID NO: 403 - DNA, 32 bp, synthetic construct; identical to SEQ ID NO: 19
  source 1..32: mol_type = other DNA
  misc_feature 19..20: note = DNA
  misc_feature order(1..18,21..32): note = RNA
  modified_base 18: mod_base = OTHER; note = 2-Prime-O-Methoxyethyl modified nucleoside
  modified_base 19: mod_base = OTHER; note = DNA nucleotide carrying a 6-amino-5-nitro-3-yl-2(1H)-pyridone nucleobase
  modified_base order(10..11,16,22,25,27): mod_base = OTHER; note = 2-Prime-Fluoro modified nucleoside
  modified_base order(1..9,12..15,17,21,23..24,26,28..32): mod_base = OTHER; note = 2-Prime-O-Methyl modified nucleoside
  modified_base order(1^2,31^32): mod_base = OTHER; note = (1,3-dimethylimidazolidin-2-ylidene) Phosphoramidate linkage
  modified_base order(2..20,21..31): mod_base = OTHER; note = Phosphorothioate linkage
  modified_base 20^21: mod_base = OTHER; note = Methylphosphonate linkage
  misc_feature 1..32: note = RM110195

SEQ ID NO: 404 - DNA, 32 bp, synthetic construct; identical to SEQ ID NO: 131
  source 1..32: mol_type = other DNA
  misc_feature 16..17: note = DNA
  misc_feature order(1..15,18..32): note = RNA
  modified_base 15: mod_base = OTHER; note = 2-Prime-O-Methoxyethyl modified nucleoside
  modified_base 16: mod_base = OTHER; note = DNA nucleotide carrying a 6-amino-5-nitro-3-yl-2(1H)-pyridone nucleobase
  modified_base order(7..8,13,19,22,24): mod_base = OTHER; note = 2-Prime-Fluoro modified nucleoside
  modified_base order(1..6,9..12,14,18,20..21,23,25..32): mod_base = OTHER; note = 2-Prime-O-Methyl modified nucleoside
  modified_base order(1^2,31^32): mod_base = OTHER; note = (1,3-dimethylimidazolidin-2-ylidene) Phosphoramidate linkage
  modified_base order(2..17,18..31): mod_base = OTHER; note = Phosphorothioate linkage
  modified_base 17^18: mod_base = OTHER; note = Methylphosphonate linkage
  misc_feature 1..32: note = RM110196

SEQ ID NO: 405 - DNA, 32 bp, synthetic construct; identical to SEQ ID NO: 132
  source 1..32: mol_type = other DNA
  misc_feature 13..14: note = DNA
  misc_feature order(1..12,15..32): note = RNA
  modified_base 12: mod_base = OTHER; note = 2-Prime-O-Methoxyethyl modified nucleoside
  modified_base 13: mod_base = OTHER; note = DNA nucleotide carrying a 6-amino-5-nitro-3-yl-2(1H)-pyridone nucleobase
  modified_base order(4..5,10,16,19,21): mod_base = OTHER; note = 2-Prime-Fluoro modified nucleoside
  modified_base order(1..3,6..9,11,15,17..18,20,22..32): mod_base = OTHER; note = 2-Prime-O-Methyl modified nucleoside
  modified_base order(1^2,31^32): mod_base = OTHER; note = (1,3-dimethylimidazolidin-2-ylidene) Phosphoramidate linkage
  modified_base order(2..14,15..31): mod_base = OTHER; note = Phosphorothioate linkage
  modified_base 14^15: mod_base = OTHER; note = Methylphosphonate linkage
  misc_feature 1..32: note = RM110197

SEQ ID NO: 406 - DNA, 32 bp, synthetic construct; identical to SEQ ID NO: 133
  source 1..32: mol_type = other DNA
  misc_feature 10..11: note = DNA
  misc_feature order(1..9,12..32): note = RNA
  modified_base 9: mod_base = OTHER; note = 2-Prime-O-Methoxyethyl modified nucleoside
  modified_base 10: mod_base = OTHER; note = DNA nucleotide carrying a 6-amino-5-nitro-3-yl-2(1H)-pyridone nucleobase
  modified_base order(1..2,7,13,16,18): mod_base = OTHER; note = 2-Prime-Fluoro modified nucleoside
  modified_base order(3..6,8,12,14..15,17,19..32): mod_base = OTHER; note = 2-Prime-O-Methyl modified nucleoside
  modified_base order(1^2,31^32): mod_base = OTHER; note = (1,3-dimethylimidazolidin-2-ylidene) Phosphoramidate linkage
  modified_base order(2..11,12..31): mod_base = OTHER; note = Phosphorothioate linkage
  modified_base 11^12: mod_base = OTHER; note = Methylphosphonate linkage
  misc_feature 1..32: note = RM110198

SEQ ID NO: 407 - DNA, 32 bp, synthetic construct; identical to SEQ ID NO: 127
  source 1..32: mol_type = other DNA
  misc_feature 28..29: note = DNA
  misc_feature order(1..27,30..32): note = RNA
  modified_base 27: mod_base = OTHER; note = 2-Prime-O-Methoxyethyl modified nucleoside
  modified_base 28: mod_base = OTHER; note = DNA nucleotide carrying a 6-amino-5-nitro-3-yl-2(1H)-pyridone nucleobase
  modified_base order(22,24,31): mod_base = OTHER; note = 2-Prime-Fluoro modified nucleoside
  modified_base order(1..21,23,25..26,30,32): mod_base = OTHER; note = 2-Prime-O-Methyl modified nucleoside
  modified_base order(1^2,31^32): mod_base = OTHER; note = (1,3-dimethylimidazolidin-2-ylidene) Phosphoramidate linkage
  modified_base order(2..29,30^31): mod_base = OTHER; note = Phosphorothioate linkage
  modified_base 29^30: mod_base = OTHER; note = Methylphosphonate linkage
  misc_feature 1..32: note = RM110199

SEQ ID NO: 408 - DNA, 32 bp, synthetic construct; identical to SEQ ID NO: 128
  source 1..32: mol_type = other DNA
  misc_feature 25..26: note = DNA
  misc_feature order(1..24,27..32): note = RNA
  modified_base 24: mod_base = OTHER; note = 2-Prime-O-Methoxyethyl modified nucleoside
  modified_base 25: mod_base = OTHER; note = DNA nucleotide carrying a 6-amino-5-nitro-3-yl-2(1H)-pyridone nucleobase
  modified_base order(19,21,28): mod_base = OTHER; note = 2-Prime-Fluoro modified nucleoside
  modified_base order(1..18,20,22..23,27,29..32): mod_base = OTHER; note = 2-Prime-O-Methyl modified nucleoside
  modified_base order(1^2,31^32): mod_base = OTHER; note = (1,3-dimethylimidazolidin-2-ylidene) Phosphoramidate linkage
  modified_base order(2..26,27..31): mod_base = OTHER; note = Phosphorothioate linkage
  modified_base 26^27: mod_base = OTHER; note = Methylphosphonate linkage
  misc_feature 1..32: note = RM110200

SEQ ID NO: 409 - DNA, 32 bp, synthetic construct; identical to SEQ ID NO: 129
  source 1..32: mol_type = other DNA
  misc_feature 22..23: note = DNA
  misc_feature order(1..21,24..32): note = RNA
  modified_base 21: mod_base = OTHER; note = 2-Prime-O-Methoxyethyl modified nucleoside
  modified_base 22: mod_base = OTHER; note = DNA nucleotide carrying a 6-amino-5-nitro-3-yl-2(1H)-pyridone nucleobase
  modified_base order(16,18,25): mod_base = OTHER; note = 2-Prime-Fluoro modified nucleoside
  modified_base order(1..15,17,19..20,24,26..32): mod_base = OTHER; note = 2-Prime-O-Methyl modified nucleoside
  modified_base order(1^2,31^32): mod_base = OTHER; note = (1,3-dimethylimidazolidin-2-ylidene) Phosphoramidate linkage
  modified_base order(2..23,24..31): mod_base = OTHER; note = Phosphorothioate linkage
  modified_base 23^24: mod_base = OTHER; note = Methylphosphonate linkage
  misc_feature 1..32: note = RM110201

SEQ ID NO: 410 - DNA, 32 bp, synthetic construct; identical to SEQ ID NO: 19
  source 1..32: mol_type = other DNA
  misc_feature 19..20: note = DNA
  misc_feature order(1..18,21..32): note = RNA
  modified_base 18: mod_base = OTHER; note = 2-Prime-O-Methoxyethyl modified nucleoside
  modified_base 19: mod_base = OTHER; note = DNA nucleotide carrying a 6-amino-5-nitro-3-yl-2(1H)-pyridone nucleobase
  modified_base order(13,15,22): mod_base = OTHER; note = 2-Prime-Fluoro modified nucleoside
  modified_base order(1..12,14,16..17,21,23..32): mod_base = OTHER; note = 2-Prime-O-Methyl modified nucleoside
  modified_base order(1^2,31^32): mod_base = OTHER; note = (1,3-dimethylimidazolidin-2-ylidene) Phosphoramidate linkage
  modified_base order(2..20,21..31): mod_base = OTHER; note = Phosphorothioate linkage
  modified_base 20^21: mod_base = OTHER; note = Methylphosphonate linkage
  misc_feature 1..32: note = RM110202

SEQ ID NO: 411 - DNA, 32 bp, synthetic construct; identical to SEQ ID NO: 131
  source 1..32: mol_type = other DNA
  misc_feature 16..17: note = DNA
  misc_feature order(1..15,18..32): note = RNA
  modified_base 15: mod_base = OTHER; note = 2-Prime-O-Methoxyethyl modified nucleoside
  modified_base 16: mod_base = OTHER; note = DNA nucleotide carrying a 6-amino-5-nitro-3-yl-2(1H)-pyridone nucleobase
  modified_base order(10,12,19): mod_base = OTHER; note = 2-Prime-Fluoro modified nucleoside
  modified_base order(1..9,11,13..14,18,20..32): mod_base = OTHER; note = 2-Prime-O-Methyl modified nucleoside
  modified_base order(1^2,31^32): mod_base = OTHER; note = (1,3-dimethylimidazolidin-2-ylidene) Phosphoramidate linkage
  modified_base order(2..17,18..31): mod_base = OTHER; note = Phosphorothioate linkage
  modified_base 17^18: mod_base = OTHER; note = Methylphosphonate linkage
  misc_feature 1..32: note = RM110203

SEQ ID NO: 412 - DNA, 32 bp, synthetic construct; identical to SEQ ID NO: 132
  source 1..32: mol_type = other DNA
  misc_feature 13..14: note = DNA
  misc_feature order(1..12,15..32): note = RNA
  modified_base 12: mod_base = OTHER; note = 2-Prime-O-Methoxyethyl modified nucleoside
  modified_base 13: mod_base = OTHER; note = DNA nucleotide carrying a 6-amino-5-nitro-3-yl-2(1H)-pyridone nucleobase
  modified_base order(7,9,16): mod_base = OTHER; note = 2-Prime-Fluoro modified nucleoside
  modified_base order(1..6,8,10..11,15,17..32): mod_base = OTHER; note = 2-Prime-O-Methyl modified nucleoside
  modified_base order(1^2,31^32): mod_base = OTHER; note = (1,3-dimethylimidazolidin-2-ylidene) Phosphoramidate linkage
  modified_base order(2..14,15..31): mod_base = OTHER; note = Phosphorothioate linkage
  modified_base 14^15: mod_base = OTHER; note = Methylphosphonate linkage
  misc_feature 1..32: note = RM110204

SEQ ID NO: 413 - DNA, 32 bp, synthetic construct; identical to SEQ ID NO: 133
  source 1..32: mol_type = other DNA
  misc_feature 10..11: note = DNA
  misc_feature order(1..9,12..32): note = RNA
  modified_base 9: mod_base = OTHER; note = 2-Prime-O-Methoxyethyl modified nucleoside
  modified_base 10: mod_base = OTHER; note = DNA nucleotide carrying a 6-amino-5-nitro-3-yl-2(1H)-pyridone nucleobase
  modified_base order(4,6,13): mod_base = OTHER; note = 2-Prime-Fluoro modified nucleoside
  modified_base order(1..3,5,7..8,12,14..32): mod_base = OTHER; note = 2-Prime-O-Methyl modified nucleoside
  modified_base order(1^2,31^32): mod_base = OTHER; note = (1,3-dimethylimidazolidin-2-ylidene) Phosphoramidate linkage
  modified_base order(2..11,12..31): mod_base = OTHER; note = Phosphorothioate linkage
  modified_base 11^12: mod_base = OTHER; note = Methylphosphonate linkage
  misc_feature 1..32: note = RM110205

SEQ ID NO: 414 - DNA, 32 bp, synthetic construct; identical to SEQ ID NO: 134
  source 1..32: mol_type = other DNA
  misc_feature 7..8: note = DNA
  misc_feature order(1..6,9..32): note = RNA
  modified_base 6: mod_base = OTHER; note = 2-Prime-O-Methoxyethyl modified nucleoside
  modified_base 7: mod_base = OTHER; note = DNA nucleotide carrying a 6-amino-5-nitro-3-yl-2(1H)-pyridone nucleobase
  modified_base order(1,3,10): mod_base = OTHER; note = 2-Prime-Fluoro modified nucleoside
  modified_base order(2,4..5,9,11..32): mod_base = OTHER; note = 2-Prime-O-Methyl modified nucleoside
  modified_base order(1^2,31^32): mod_base = OTHER; note = (1,3-dimethylimidazolidin-2-ylidene) Phosphoramidate linkage
  modified_base order(2..8,9..31): mod_base = OTHER; note = Phosphorothioate linkage
  modified_base 8^9: mod_base = OTHER; note = Methylphosphonate linkage
  misc_feature 1..32: note = RM110206

SEQ ID NO: 415 - DNA, 32 bp, synthetic construct; identical to SEQ ID NO: 19
  source 1..32: mol_type = other DNA
  misc_feature 19..20: note = DNA
  misc_feature order(1..18,21..32): note = RNA
  modified_base 18: mod_base = OTHER; note = 2-Prime-O-Methoxyethyl modified nucleoside
  modified_base 19: mod_base = OTHER; note = DNA nucleotide carrying a 6-amino-5-nitro-3-yl-2(1H)-pyridone nucleobase
  modified_base order(1,3,7,9..10,22,29..31): mod_base = OTHER; note = 2-Prime-Fluoro modified nucleoside
  modified_base order(2,4..6,8,11..17,21,23..28,32): mod_base = OTHER; note = 2-Prime-O-Methyl modified nucleoside
  modified_base order(1^2,31^32): mod_base = OTHER; note = (1,3-dimethylimidazolidin-2-ylidene) Phosphoramidate linkage
  modified_base order(2..20,21..31): mod_base = OTHER; note = Phosphorothioate linkage
  modified_base 20^21: mod_base = OTHER; note = Methylphosphonate linkage
  misc_feature 1..32: note = RM110207

SEQ ID NO: 416 - DNA, 32 bp, synthetic construct; identical to SEQ ID NO: 127
  source 1..32: mol_type = other DNA
  misc_feature 28..29: note = DNA
  misc_feature order(1..27,30..32): note = RNA
  modified_base 27: mod_base = OTHER; note = 2-Prime-O-Methoxyethyl modified nucleoside
  modified_base 28: mod_base = OTHER; note = DNA nucleotide carrying a 6-amino-5-nitro-3-yl-2(1H)-pyridone nucleobase
  modified_base order(10,12,16,18..19,31): mod_base = OTHER; note = 2-Prime-Fluoro modified nucleoside
  modified_base order(1..9,11,13..15,17,20..26,30,32): mod_base = OTHER; note = 2-Prime-O-Methyl modified nucleoside
  modified_base order(1^2,31^32): mod_base = OTHER; note = (1,3-dimethylimidazolidin-2-ylidene) Phosphoramidate linkage
  modified_base order(2..29,30^31): mod_base = OTHER; note = Phosphorothioate linkage
  modified_base 29^30: mod_base = OTHER; note = Methylphosphonate linkage
  misc_feature 1..32: note = RM110208

SEQ ID NO: 417 - DNA, 32 bp, synthetic construct; identical to SEQ ID NO: 128
  source 1..32: mol_type = other DNA
  misc_feature 25..26: note = DNA
  misc_feature order(1..24,27..32): note = RNA
  modified_base 24: mod_base = OTHER; note = 2-Prime-O-Methoxyethyl modified nucleoside
  modified_base 25: mod_base = OTHER; note = DNA nucleotide carrying a 6-amino-5-nitro-3-yl-2(1H)-pyridone nucleobase
  modified_base order(7,9,13,15..16,28): mod_base = OTHER; note = 2-Prime-Fluoro modified nucleoside
  modified_base order(1..6,8,10..12,14,17..23,27,29..32): mod_base = OTHER; note = 2-Prime-O-Methyl modified nucleoside
  modified_base order(1^2,31^32): mod_base = OTHER; note = (1,3-dimethylimidazolidin-2-ylidene) Phosphoramidate linkage
  modified_base order(2..26,27..31): mod_base = OTHER; note = Phosphorothioate linkage
  modified_base 26^27: mod_base = OTHER; note = Methylphosphonate linkage
  misc_feature 1..32: note = RM110209

SEQ ID NO: 418 - DNA, 32 bp, synthetic construct; identical to SEQ ID NO: 129
  source 1..32: mol_type = other DNA
  misc_feature 22..23: note = DNA
  misc_feature order(1..21,24..32): note = RNA
  modified_base 21: mod_base = OTHER; note = 2-Prime-O-Methoxyethyl modified nucleoside
  modified_base 22: mod_base = OTHER; note = DNA nucleotide carrying a 6-amino-5-nitro-3-yl-2(1H)-pyridone nucleobase
  modified_base order(4,6,10,12..13,25): mod_base = OTHER; note = 2-Prime-Fluoro modified nucleoside
  modified_base order(1..3,5,7..9,11,14..20,24,26..32): mod_base = OTHER; note = 2-Prime-O-Methyl modified nucleoside
  modified_base order(1^2,31^32): mod_base = OTHER; note = (1,3-dimethylimidazolidin-2-ylidene) Phosphoramidate linkage
  modified_base order(2..23,24..31): mod_base = OTHER; note = Phosphorothioate linkage
  modified_base 23^24: mod_base = OTHER; note = Methylphosphonate linkage
  misc_feature 1..32: note = RM110210

SEQ ID NO: 419 - DNA, 32 bp, synthetic construct; identical to SEQ ID NO: 19
  source 1..32: mol_type = other DNA
  misc_feature 19..20: note = DNA
  misc_feature order(1..18,21..32): note = RNA
  modified_base 18: mod_base = OTHER; note = 2-Prime-O-Methoxyethyl modified nucleoside
  modified_base 19: mod_base = OTHER; note = DNA nucleotide carrying a 6-amino-5-nitro-3-yl-2(1H)-pyridone nucleobase
  modified_base order(1,3,7,9..10,22): mod_base = OTHER; note = 2-Prime-Fluoro modified nucleoside
  modified_base order(2,4..6,8,11..17,21,23..32): mod_base = OTHER; note = 2-Prime-O-Methyl modified nucleoside
  modified_base order(1^2,31^32): mod_base = OTHER; note = (1,3-dimethylimidazolidin-2-ylidene) Phosphoramidate linkage
  modified_base order(2..20,21..31): mod_base = OTHER; note = Phosphorothioate linkage
  modified_base 20^21: mod_base = OTHER; note = Methylphosphonate linkage
  misc_feature 1..32: note = RM110211

SEQ ID NO: 420 - DNA, 32 bp, synthetic construct; identical to SEQ ID NO: 127
  source 1..32: mol_type = other DNA
  misc_feature 28..29: note = DNA
  misc_feature order(1..27,30..32): note = RNA
  modified_base 27: mod_base = OTHER; note = 2-Prime-O-Methoxyethyl modified nucleoside
  modified_base 28: mod_base = OTHER; note = DNA nucleotide carrying a 6-amino-5-nitro-3-yl-2(1H)-pyridone nucleobase
  modified_base order(18..19,31): mod_base = OTHER; note = 2-Prime-Fluoro modified nucleoside
  modified_base order(1..17,20..26,30,32): mod_base = OTHER; note = 2-Prime-O-Methyl modified nucleoside
  modified_base order(1^2,31^32): mod_base = OTHER; note = (1,3-dimethylimidazolidin-2-ylidene) Phosphoramidate linkage
  modified_base order(2..29,30^31): mod_base = OTHER; note = Phosphorothioate linkage
  modified_base 29^30: mod_base = OTHER; note = Methylphosphonate linkage
  misc_feature 1..32: note = RM110212

SEQ ID NO: 421 - DNA, 32 bp, synthetic construct; identical to SEQ ID NO: 128
  source 1..32: mol_type = other DNA
  misc_feature 25..26: note = DNA
  misc_feature order(1..24,27..32): note = RNA
  modified_base 24: mod_base = OTHER; note = 2-Prime-O-Methoxyethyl modified nucleoside
  modified_base 25: mod_base = OTHER; note = DNA nucleotide carrying a 6-amino-5-nitro-3-yl-2(1H)-pyridone nucleobase
  modified_base order(15..16,28): mod_base = OTHER; note = 2-Prime-Fluoro modified nucleoside
  modified_base order(1..14,17..23,27,29..32): mod_base = OTHER; note = 2-Prime-O-Methyl modified nucleoside
  modified_base order(1^2,31^32): mod_base = OTHER; note = (1,3-dimethylimidazolidin-2-ylidene) Phosphoramidate linkage
  modified_base order(2..26,27..31): mod_base = OTHER; note = Phosphorothioate linkage
  modified_base 26^27: mod_base = OTHER; note = Methylphosphonate linkage
  misc_feature 1..32: note = RM110213

SEQ ID NO: 422 - DNA, 32 bp, synthetic construct; identical to SEQ ID NO: 129
  source 1..32: mol_type = other DNA
  misc_feature 22..23: note = DNA
  misc_feature order(1..21,24..32): note = RNA
  modified_base 21: mod_base = OTHER; note = 2-Prime-O-Methoxyethyl modified nucleoside
  modified_base 22: mod_base = OTHER; note = DNA nucleotide carrying a 6-amino-5-nitro-3-yl-2(1H)-pyridone nucleobase
  modified_base order(12..13,25): mod_base = OTHER; note = 2-Prime-Fluoro modified nucleoside
  modified_base order(1..11,14..20,24,26..32): mod_base = OTHER; note = 2-Prime-O-Methyl modified nucleoside
  modified_base order(1^2,31^32): mod_base = OTHER; note = (1,3-dimethylimidazolidin-2-ylidene) Phosphoramidate linkage
  modified_base order(2..23,24..31): mod_base = OTHER; note = Phosphorothioate linkage
  modified_base 23^24: mod_base = OTHER; note = Methylphosphonate linkage
  misc_feature 1..32: note = RM110214

SEQ ID NO: 423 - DNA, 32 bp, synthetic construct; identical to SEQ ID NO: 19
  source 1..32: mol_type = other DNA
  misc_feature 19..20: note = DNA
  misc_feature order(1..18,21..32): note = RNA
  modified_base 18: mod_base = OTHER; note = 2-Prime-O-Methoxyethyl modified nucleoside
  modified_base 19: mod_base = OTHER; note = DNA nucleotide carrying a 6-amino-5-nitro-3-yl-2(1H)-pyridone nucleobase
  modified_base order(9..10,22): mod_base = OTHER; note = 2-Prime-Fluoro modified nucleoside
  modified_base order(1..8,11..17,21,23..32): mod_base = OTHER; note = 2-Prime-O-Methyl modified nucleoside
  modified_base order(1^2,31^32): mod_base = OTHER; note = (1,3-dimethylimidazolidin-2-ylidene) Phosphoramidate linkage
  modified_base order(2..20,21..31): mod_base = OTHER; note = Phosphorothioate linkage
  modified_base 20^21: mod_base = OTHER; note = Methylphosphonate linkage
  misc_feature 1..32: note = RM110215

SEQ ID NO: 424 - DNA, 32 bp, synthetic construct; identical to SEQ ID NO: 131
  source 1..32: mol_type = other DNA
  misc_feature 16..17: note = DNA
  misc_feature order(1..15,18..32): note = RNA
  modified_base 15: mod_base = OTHER; note = 2-Prime-O-Methoxyethyl modified nucleoside
  modified_base 16: mod_base = OTHER; note = DNA nucleotide carrying a 6-amino-5-nitro-3-yl-2(1H)-pyridone nucleobase
  modified_base order(6..7,19): mod_base = OTHER; note = 2-Prime-Fluoro modified nucleoside
  modified_base order(1..5,8..14,18,20..32): mod_base = OTHER; note = 2-Prime-O-Methyl modified nucleoside
  modified_base order(1^2,31^32): mod_base = OTHER; note = (1,3-dimethylimidazolidin-2-ylidene) Phosphoramidate linkage
  modified_base order(2..17,18..31): mod_base = OTHER; note = Phosphorothioate linkage
  modified_base 17^18: mod_base = OTHER; note = Methylphosphonate linkage
  misc_feature 1..32: note = RM110216

SEQ ID NO: 425 - DNA, 32 bp, synthetic construct; identical to SEQ ID NO: 132
  source 1..32: mol_type = other DNA
  misc_feature 13..14: note = DNA
  misc_feature order(1..12,15..32): note = RNA
  modified_base 12: mod_base = OTHER; note = 2-Prime-O-Methoxyethyl modified nucleoside
  modified_base 13: mod_base = OTHER; note = DNA nucleotide carrying a 6-amino-5-nitro-3-yl-2(1H)-pyridone nucleobase
  modified_base order(3..4,16): mod_base = OTHER; note = 2-Prime-Fluoro modified nucleoside
  modified_base order(1..2,5..11,15,17..32): mod_base = OTHER; note = 2-Prime-O-Methyl modified nucleoside
  modified_base order(1^2,31^32): mod_base = OTHER; note = (1,3-dimethylimidazolidin-2-ylidene) Phosphoramidate linkage
  modified_base order(2..14,15..31): mod_base = OTHER; note = Phosphorothioate linkage
  modified_base 14^15: mod_base = OTHER; note = Methylphosphonate linkage
  misc_feature 1..32: note = RM110217

SEQ ID NO: 426 - DNA, 29 bp, synthetic construct
  source 1..29: mol_type = other DNA
  misc_feature 24..25: note = DNA
  misc_feature order(1..23,26..29): note = RNA
  modified_base 23: mod_base = OTHER; note = 2-Prime-O-Methoxyethyl modified nucleoside
  modified_base 24: mod_base = OTHER; note = DNA nucleotide carrying a 6-amino-5-nitro-3-yl-2(1H)-pyridone nucleobase
  modified_base order(4,6,9,15,20..21,27,29): mod_base = OTHER; note = 2-Prime-Fluoro modified nucleoside
  modified_base order(1..3,5,7..8,10..14,16..19,22,26,28): mod_base = OTHER; note = 2-Prime-O-Methyl modified nucleoside
  modified_base order(1^2,28^29): mod_base = OTHER; note = (1,3-dimethylimidazolidin-2-ylidene) Phosphoramidate linkage
  modified_base order(2..25,26..28): mod_base = OTHER; note = Phosphorothioate linkage
  modified_base 25^26: mod_base = OTHER; note = Methylphosphonate linkage
  misc_feature 1..29: note = RM110218
caattcggtcaaacctctgaggantgggt

SEQ ID NO: 427 - DNA, 29 bp, synthetic construct
  source 1..29: mol_type = other DNA
  misc_feature 21..22: note = DNA
  misc_feature order(1..20,23..29): note = RNA
  modified_base 20: mod_base = OTHER; note = 2-Prime-O-Methoxyethyl modified nucleoside
  modified_base 21: mod_base = OTHER; note = DNA nucleotide carrying a 6-amino-5-nitro-3-yl-2(1H)-pyridone nucleobase
  modified_base order(1,3,6,12,17..18,24,26): mod_base = OTHER; note = 2-Prime-Fluoro modified nucleoside
  modified_base order(2,4..5,7..11,13..16,19,23,25,27..29): mod_base = OTHER; note = 2-Prime-O-Methyl modified nucleoside
  modified_base order(1^2,28^29): mod_base = OTHER; note = (1,3-dimethylimidazolidin-2-ylidene) Phosphoramidate linkage
  modified_base order(2..22,23..28): mod_base = OTHER; note = Phosphorothioate linkage
  modified_base 22^23: mod_base = OTHER; note = Methylphosphonate linkage
  misc_feature 1..29: note = RM110219
ttcggtcaaacctctgaggantgggttca

SEQ ID NO: 428 - DNA, 29 bp, synthetic construct
  source 1..29: mol_type = other DNA
  misc_feature 6..7: note = DNA
  misc_feature order(1..5,8..29): note = RNA
  modified_base 5: mod_base = OTHER; note = 2-Prime-O-Methoxyethyl modified nucleoside
  modified_base 6: mod_base = OTHER; note = DNA nucleotide carrying a 6-amino-5-nitro-3-yl-2(1H)-pyridone nucleobase
  modified_base order(3,9,11..12,17,23,26,28): mod_base = OTHER; note = 2-Prime-Fluoro modified nucleoside
  modified_base order(1..2,4,8,10,13..16,18..22,24..25,27,29): mod_base = OTHER; note = 2-Prime-O-Methyl modified nucleoside
  modified_base order(1^2,28^29): mod_base = OTHER; note = (1,3-dimethylimidazolidin-2-ylidene) Phosphoramidate linkage
  modified_base order(2..7,8..28): mod_base = OTHER; note = Phosphorothioate linkage
  modified_base 7^8: mod_base = OTHER; note = Methylphosphonate linkage
  misc_feature 1..29: note = RM110220
gaggantgggttcatttttcttgtctctt

SEQ ID NO: 429 - DNA, 26 bp, synthetic construct
  source 1..26: mol_type = other DNA
  misc_feature 19..20: note = DNA
  misc_feature order(1..18,21..26): note = RNA
  modified_base 18: mod_base = OTHER; note = 2-Prime-O-Methoxyethyl modified nucleoside
  modified_base 19: mod_base = OTHER; note = DNA nucleotide carrying a 6-amino-5-nitro-3-yl-2(1H)-pyridone nucleobase
  modified_base order(10,15..16,22,24): mod_base = OTHER; note = 2-Prime-Fluoro modified nucleoside
  modified_base order(1..9,11..14,17,21,23,25..26): mod_base = OTHER; note = 2-Prime-O-Methyl modified nucleoside
  modified_base order(1^2,25^26): mod_base = OTHER; note = (1,3-dimethylimidazolidin-2-ylidene) Phosphoramidate linkage
  modified_base order(2..20,21..25): mod_base = OTHER; note = Phosphorothioate linkage
  modified_base 20^21: mod_base = OTHER; note = Methylphosphonate linkage
  misc_feature 1..26: note = RM110221
cggtcaaacctctgaggantgggttc

SEQ ID NO: 430 - DNA, 26 bp, synthetic construct
  source 1..26: mol_type = other DNA
  misc_feature 16..17: note = DNA
  misc_feature order(1..15,18..26): note = RNA
  modified_base 15: mod_base = OTHER; note = 2-Prime-O-Methoxyethyl modified nucleoside
  modified_base 16: mod_base = OTHER; note = DNA nucleotide carrying a 6-amino-5-nitro-3-yl-2(1H)-pyridone nucleobase
  modified_base order(7,12..13,19,21): mod_base = OTHER; note = 2-Prime-Fluoro modified nucleoside
  modified_base order(1..6,8..11,14,18,20,22..26): mod_base = OTHER; note = 2-Prime-O-Methyl modified nucleoside
  modified_base order(1^2,25^26): mod_base = OTHER; note = (1,3-dimethylimidazolidin-2-ylidene) Phosphoramidate linkage
  modified_base order(2..17,18..25): mod_base = OTHER; note = Phosphorothioate linkage
  modified_base 17^18: mod_base = OTHER; note = Methylphosphonate linkage
  misc_feature 1..26: note = RM110222
tcaaacctctgaggantgggttcatt

SEQ ID NO: 431 - DNA, 26 bp, synthetic construct
  source 1..26: mol_type = other DNA
  misc_feature 13..14: note = DNA
  misc_feature order(1..12,15..26): note = RNA
  modified_base 12: mod_base = OTHER; note = 2-Prime-O-Methoxyethyl modified nucleoside
  modified_base 13: mod_base = OTHER; note = DNA nucleotide carrying a 6-amino-5-nitro-3-yl-2(1H)-pyridone nucleobase
  modified_base order(4,9..10,16,18): mod_base = OTHER; note = 2-Prime-Fluoro modified nucleoside
  modified_base order(1..3,5..8,11,15,17,19..26): mod_base = OTHER; note = 2-Prime-O-Methyl modified nucleoside
  modified_base order(1^2,25^26): mod_base = OTHER; note = (1,3-dimethylimidazolidin-2-ylidene) Phosphoramidate linkage
  modified_base order(2..14,15..25): mod_base = OTHER; note = Phosphorothioate linkage
  modified_base 14^15: mod_base = OTHER; note = Methylphosphonate linkage
  misc_feature 1..26: note = RM110223
aacctctgaggantgggttcattttt

SEQ ID NO: 432 - DNA, 26 bp, synthetic construct
  source 1..26: mol_type = other DNA
  misc_feature 10..11: note = DNA
  misc_feature order(1..9,12..26): note = RNA
  modified_base 9: mod_base = OTHER; note = 2-Prime-O-Methoxyethyl modified nucleoside
  modified_base 10: mod_base = OTHER; note = DNA nucleotide carrying a 6-amino-5-nitro-3-yl-2(1H)-pyridone nucleobase
  modified_base order(1,6..7,13,15): mod_base = OTHER; note = 2-Prime-Fluoro modified nucleoside
  modified_base order(2..5,8,12,14,16..26): mod_base = OTHER; note = 2-Prime-O-Methyl modified nucleoside
  modified_base order(1^2,25^26): mod_base = OTHER; note = (1,3-dimethylimidazolidin-2-ylidene) Phosphoramidate linkage
  modified_base order(2..11,12..25): mod_base = OTHER; note = Phosphorothioate linkage
  modified_base 11^12: mod_base = OTHER; note = Methylphosphonate linkage
  misc_feature 1..26: note = RM110224
ctctgaggantgggttcatttttctt

SEQ ID NO: 433 - DNA, 29 bp, synthetic construct
  source 1..29: mol_type = other DNA
  misc_feature 24..25: note = DNA
  misc_feature order(1..23,26..29): note = RNA
  modified_base 23: mod_base = OTHER; note = 2-Prime-O-Methoxyethyl modified nucleoside
  modified_base 24: mod_base = OTHER; note = DNA nucleotide carrying a 6-amino-5-nitro-3-yl-2(1H)-pyridone nucleobase
  modified_base order(15,20..21,27,29): mod_base = OTHER; note = 2-Prime-Fluoro modified nucleoside
  modified_base order(1..14,16..19,22,26,28): mod_base = OTHER; note = 2-Prime-O-Methyl modified nucleoside
  modified_base order(1^2,28^29): mod_base = OTHER; note = (1,3-dimethylimidazolidin-2-ylidene) Phosphoramidate linkage
  modified_base order(2..25,26..28): mod_base = OTHER; note = Phosphorothioate linkage
  modified_base 25^26: mod_base = OTHER; note = Methylphosphonate linkage
  misc_feature 1..29: note = RM110225
caattcggtcaaacctctgaggantgggt

SEQ ID NO: 434 - DNA, 29 bp, synthetic construct
  source 1..29: mol_type = other DNA
  misc_feature 21..22: note = DNA
  misc_feature order(1..20,23..29): note = RNA
  modified_base 20: mod_base = OTHER; note = 2-Prime-O-Methoxyethyl modified nucleoside
  modified_base 21: mod_base = OTHER; note = DNA nucleotide carrying a 6-amino-5-nitro-3-yl-2(1H)-pyridone nucleobase
  modified_base order(12,17..18,24,26): mod_base = OTHER; note = 2-Prime-Fluoro modified nucleoside
  modified_base order(1..11,13..16,19,23,25,27..29): mod_base = OTHER; note = 2-Prime-O-Methyl modified nucleoside
  modified_base order(1^2,28^29): mod_base = OTHER; note = (1,3-dimethylimidazolidin-2-ylidene) Phosphoramidate linkage
  modified_base order(2..22,23..28): mod_base = OTHER; note = Phosphorothioate linkage
  modified_base 22^23: mod_base = OTHER; note = Methylphosphonate linkage
  misc_feature 1..29: note = RM110226
ttcggtcaaacctctgaggantgggttca

SEQ ID NO: 435 - DNA, 29 bp, synthetic construct
  source 1..29: mol_type = other DNA
  misc_feature 18..19: note = DNA
  misc_feature order(1..17,20..29): note = RNA
  modified_base 17: mod_base = OTHER; note = 2-Prime-O-Methoxyethyl modified nucleoside
  modified_base 18: mod_base = OTHER; note = DNA nucleotide carrying a 6-amino-5-nitro-3-yl-2(1H)-pyridone nucleobase
  modified_base order(9,14..15,21,23): mod_base = OTHER; note = 2-Prime-Fluoro modified nucleoside
  modified_base order(1..8,10..13,16,20,22,24..29): mod_base = OTHER; note = 2-Prime-O-Methyl modified nucleoside
  modified_base order(1^2,28^29): mod_base = OTHER; note = (1,3-dimethylimidazolidin-2-ylidene) Phosphoramidate linkage
  modified_base order(2..19,20..28): mod_base = OTHER; note = Phosphorothioate linkage
  modified_base 19^20: mod_base = OTHER; note = Methylphosphonate linkage
  misc_feature 1..29: note = RM110227
ggtcaaacctctgaggantgggttcattt

SEQ ID NO: 436 - DNA, 29 bp, synthetic construct
  source 1..29: mol_type = other DNA
  misc_feature 15..16: note = DNA
  misc_feature order(1..14,17..29): note = RNA
  modified_base 14: mod_base = OTHER; note = 2-Prime-O-Methoxyethyl modified nucleoside
  modified_base 15: mod_base = OTHER; note = DNA nucleotide carrying a 6-amino-5-nitro-3-yl-2(1H)-pyridone nucleobase
  modified_base order(6,11..12,18,20): mod_base = OTHER; note = 2-Prime-Fluoro modified nucleoside
  modified_base order(1..5,7..10,13,17,19,21..29): mod_base = OTHER; note = 2-Prime-O-Methyl modified nucleoside
  modified_base order(1^2,28^29): mod_base = OTHER; note = (1,3-dimethylimidazolidin-2-ylidene) Phosphoramidate linkage
  modified_base order(2..16,17..28): mod_base = OTHER; note = Phosphorothioate linkage
  modified_base 16^17: mod_base = OTHER; note = Methylphosphonate linkage
  misc_feature 1..29: note = RM110228
caaacctctgaggantgggttcatttttc

SEQ ID NO: 437 - DNA, 29 bp, synthetic construct
  source 1..29: mol_type = other DNA
  misc_feature 12..13: note = DNA
  misc_feature order(1..11,14..29): note = RNA
  modified_base 11: mod_base = OTHER; note = 2-Prime-O-Methoxyethyl modified nucleoside
  modified_base 12: mod_base = OTHER; note = DNA nucleotide carrying a 6-amino-5-nitro-3-yl-2(1H)-pyridone nucleobase
  modified_base order(3,8..9,15,17): mod_base = OTHER; note = 2-Prime-Fluoro modified nucleoside
  modified_base order(1..2,4..7,10,14,16,18..29): mod_base = OTHER; note = 2-Prime-O-Methyl modified nucleoside
  modified_base order(1^2,28^29): mod_base = OTHER; note = (1,3-dimethylimidazolidin-2-ylidene) Phosphoramidate linkage
  modified_base order(2..13,14..28): mod_base = OTHER; note = Phosphorothioate linkage
  modified_base 13^14: mod_base = OTHER; note = Methylphosphonate linkage
  misc_feature 1..29: note = RM110229
acctctgaggantgggttcatttttcttg

SEQ ID NO: 438 - DNA, 26 bp, synthetic construct
  source 1..26: mol_type = other DNA
  misc_feature 13..14: note = DNA
  misc_feature order(1..12,15..26): note = RNA
  modified_base 12: mod_base = OTHER; note = 2-Prime-O-Methoxyethyl modified nucleoside
  modified_base 13: mod_base = OTHER; note = DNA nucleotide carrying a 6-amino-5-nitro-3-yl-2(1H)-pyridone nucleobase
  modified_base order(10,16,18..19,24): mod_base = OTHER; note = 2-Prime-Fluoro modified nucleoside
  modified_base order(1..9,11,15,17,20..23,25..26): mod_base = OTHER; note = 2-Prime-O-Methyl modified nucleoside
  modified_base order(1^2,25^26): mod_base = OTHER; note = (1,3-dimethylimidazolidin-2-ylidene) Phosphoramidate linkage
  modified_base order(2..14,15..25): mod_base = OTHER; note = Phosphorothioate linkage
  modified_base 14^15: mod_base = OTHER; note = Methylphosphonate linkage
  misc_feature 1..26: note = RM110230
aacctctgaggantgggttcattttt

SEQ ID NO: 439 - DNA, 26 bp, synthetic construct
  source 1..26: mol_type = other DNA
  misc_feature 10..11: note = DNA
  misc_feature order(1..9,12..26): note = RNA
  modified_base 9: mod_base = OTHER; note = 2-Prime-O-Methoxyethyl modified nucleoside
  modified_base 10: mod_base = OTHER; note = DNA nucleotide carrying a 6-amino-5-nitro-3-yl-2(1H)-pyridone nucleobase
  modified_base order(7,13,15..16,21): mod_base = OTHER; note = 2-Prime-Fluoro modified nucleoside
  modified_base order(1..6,8,12,14,17..20,22..26): mod_base = OTHER; note = 2-Prime-O-Methyl modified nucleoside
  modified_base order(1^2,25^26): mod_base = OTHER; note = (1,3-dimethylimidazolidin-2-ylidene) Phosphoramidate linkage
  modified_base order(2..11,12..25): mod_base = OTHER; note = Phosphorothioate linkage
  modified_base 11^12: mod_base = OTHER; note = Methylphosphonate linkage
  misc_feature 1..26: note = RM110231
ctctgaggantgggttcatttttctt

SEQ ID NO: 440 - DNA, 26 bp, synthetic construct
  source 1..26: mol_type = other DNA
  misc_feature 7..8: note = DNA
  misc_feature order(1..6,9..26): note = RNA
  modified_base 6: mod_base = OTHER; note = 2-Prime-O-Methoxyethyl modified nucleoside
  modified_base 7: mod_base = OTHER; note = DNA nucleotide carrying a 6-amino-5-nitro-3-yl-2(1H)-pyridone nucleobase
  modified_base order(4,10,12..13,18): mod_base = OTHER; note = 2-Prime-Fluoro modified nucleoside
  modified_base order(1..3,5,9,11,14..17,19..26): mod_base = OTHER; note = 2-Prime-O-Methyl modified nucleoside
  modified_base order(1^2,25^26): mod_base = OTHER; note = (1,3-dimethylimidazolidin-2-ylidene) Phosphoramidate linkage
  modified_base order(2..8,9..25): mod_base = OTHER; note = Phosphorothioate linkage
  modified_base 8^9: mod_base = OTHER; note = Methylphosphonate linkage
  misc_feature 1..26: note = RM110232
tgaggantgggttcatttttcttgtc

SEQ ID NO: 441 - DNA, 29 bp, synthetic construct
  source 1..29: mol_type = other DNA
  misc_feature 18..19: note = DNA
  misc_feature order(1..17,20..29): note = RNA
  modified_base 17: mod_base = OTHER; note = 2-Prime-O-Methoxyethyl modified nucleoside
  modified_base 18: mod_base = OTHER; note = DNA nucleotide carrying a 6-amino-5-nitro-3-yl-2(1H)-pyridone nucleobase
  modified_base order(15,21,23..24,29): mod_base = OTHER; note = 2-Prime-Fluoro modified nucleoside
  modified_base order(1..14,16,20,22,25..28): mod_base = OTHER; note = 2-Prime-O-Methyl modified nucleoside
  modified_base order(1^2,28^29): mod_base = OTHER; note = (1,3-dimethylimidazolidin-2-ylidene) Phosphoramidate linkage
  modified_base order(2..19,20..28): mod_base = OTHER; note = Phosphorothioate linkage
  modified_base 19^20: mod_base = OTHER; note = Methylphosphonate linkage
  misc_feature 1..29: note = RM110233
ggtcaaacctctgaggantgggttcattt

SEQ ID NO: 442 - DNA, 29 bp, synthetic construct
  source 1..29: mol_type = other DNA
  misc_feature 15..16: note = DNA
  misc_feature order(1..14,17..29): note = RNA
  modified_base 14: mod_base = OTHER; note = 2-Prime-O-Methoxyethyl modified nucleoside
  modified_base 15: mod_base = OTHER; note = DNA nucleotide carrying a 6-amino-5-nitro-3-yl-2(1H)-pyridone nucleobase
  modified_base order(12,18,20..21,26): mod_base = OTHER; note = 2-Prime-Fluoro modified nucleoside
  modified_base order(1..11,13,17,19,22..25,27..29): mod_base = OTHER; note = 2-Prime-O-Methyl modified nucleoside
  modified_base order(1^2,28^29): mod_base = OTHER; note = (1,3-dimethylimidazolidin-2-ylidene) Phosphoramidate linkage
  modified_base order(2..16,17..28): mod_base = OTHER; note = Phosphorothioate linkage
  modified_base 16^17: mod_base = OTHER; note = Methylphosphonate linkage
  misc_feature 1..29: note = RM110234
caaacctctgaggantgggttcatttttc

SEQ ID NO: 443 - DNA, 29 bp, synthetic construct
  source 1..29: mol_type = other DNA
  misc_feature 12..13: note = DNA
  misc_feature order(1..11,14..29): note = RNA
  modified_base 11: mod_base = OTHER; note = 2-Prime-O-Methoxyethyl modified nucleoside
  modified_base 12: mod_base = OTHER; note = DNA nucleotide carrying a 6-amino-5-nitro-3-yl-2(1H)-pyridone nucleobase
  modified_base order(9,15,17..18,23): mod_base = OTHER; note = 2-Prime-Fluoro modified nucleoside
  modified_base order(1..8,10,14,16,19..22,24..29): mod_base = OTHER; note = 2-Prime-O-Methyl modified nucleoside
  modified_base order(1^2,28^29): mod_base = OTHER; note = (1,3-dimethylimidazolidin-2-ylidene) Phosphoramidate linkage
  modified_base order(2..13,14..28): mod_base = OTHER; note = Phosphorothioate linkage
  modified_base 13^14: mod_base = OTHER; note = Methylphosphonate linkage
  misc_feature 1..29: note = RM110235
acctctgaggantgggttcatttttcttg

SEQ ID NO: 444 - DNA, 29 bp, synthetic construct
  source 1..29: mol_type = other DNA
  misc_feature 9..10: note = DNA
  misc_feature order(1..8,11..29): note = RNA
  modified_base 8: mod_base = OTHER; note = 2-Prime-O-Methoxyethyl modified nucleoside
  modified_base 9: mod_base = OTHER; note = DNA nucleotide carrying a 6-amino-5-nitro-3-yl-2(1H)-pyridone nucleobase
  modified_base order(6,12,14..15,20): mod_base = OTHER; note = 2-Prime-Fluoro modified nucleoside
  modified_base order(1..5,7,11,13,16..19,21..29): mod_base = OTHER; note = 2-Prime-O-Methyl modified nucleoside
  modified_base order(1^2,28^29): mod_base = OTHER; note = (1,3-dimethylimidazolidin-2-ylidene) Phosphoramidate linkage
  modified_base order(2..10,11..28): mod_base = OTHER; note = Phosphorothioate linkage
  modified_base 10^11: mod_base = OTHER; note = Methylphosphonate linkage
  misc_feature 1..29: note = RM110236
tctgaggantgggttcatttttcttgtct

SEQ ID NO: 445 - DNA, 29 bp, synthetic construct
  source 1..29: mol_type = other DNA
  misc_feature 6..7: note = DNA
  misc_feature order(1..5,8..29): note = RNA
  modified_base 5: mod_base = OTHER; note = 2-Prime-O-Methoxyethyl modified nucleoside
  modified_base 6: mod_base = OTHER; note = DNA nucleotide carrying a 6-amino-5-nitro-3-yl-2(1H)-pyridone nucleobase
  modified_base order(3,9,11..12,17): mod_base = OTHER; note = 2-Prime-Fluoro modified nucleoside
  modified_base order(1..2,4,8,10,13..16,18..29): mod_base = OTHER; note = 2-Prime-O-Methyl modified nucleoside
  modified_base order(1^2,28^29): mod_base = OTHER; note = (1,3-dimethylimidazolidin-2-ylidene) Phosphoramidate linkage
  modified_base order(2..7,8..28): mod_base = OTHER; note = Phosphorothioate linkage
  modified_base 7^8: mod_base = OTHER; note = Methylphosphonate linkage
  misc_feature 1..29: note = RM110237
gaggantgggttcatttttcttgtctctt

SEQ ID NO: 446 - DNA, 32 bp, synthetic construct; identical to SEQ ID NO: 132
  source 1..32: mol_type = other DNA
  misc_feature 13..14: note = DNA
  misc_feature order(1..12,15..32): note = RNA
  modified_base 12: mod_base = OTHER; note = 2-Prime-O-Methoxyethyl modified nucleoside
  modified_base 13: mod_base = OTHER; note = DNA nucleotide carrying a 6-amino-5-nitro-3-yl-2(1H)-pyridone nucleobase
  modified_base order(6..7,9,16,24..25,27..28,30): mod_base = OTHER; note = 2-Prime-Fluoro modified nucleoside
  modified_base order(1..5,8,10..11,15,17..23,26,29,31..32): mod_base = OTHER; note = 2-Prime-O-Methyl modified nucleoside
  modified_base order(1^2,31^32): mod_base = OTHER; note = (1,3-dimethylimidazolidin-2-ylidene) Phosphoramidate linkage
  modified_base order(2..14,15..31): mod_base = OTHER; note = Phosphorothioate linkage
  modified_base 14^15: mod_base = OTHER; note = Methylphosphonate linkage
  misc_feature 1..32: note = RM110238

SEQ ID NO: 447 - DNA, 32 bp, synthetic construct; identical to SEQ ID NO: 133
  source 1..32: mol_type = other DNA
  misc_feature 10..11: note = DNA
  misc_feature order(1..9,12..32): note = RNA
  modified_base 9: mod_base = OTHER; note = 2-Prime-O-Methoxyethyl modified nucleoside
  modified_base 10: mod_base = OTHER; note = DNA nucleotide carrying a 6-amino-5-nitro-3-yl-2(1H)-pyridone nucleobase
  modified_base order(3..4,6,13,21..22,24..25,27): mod_base = OTHER; note = 2-Prime-Fluoro modified nucleoside
  modified_base order(1..2,5,7..8,12,14..20,23,26,28..32): mod_base = OTHER; note = 2-Prime-O-Methyl modified nucleoside
  modified_base order(1^2,31^32): mod_base = OTHER; note = (1,3-dimethylimidazolidin-2-ylidene) Phosphoramidate linkage
  modified_base order(2..11,12..31): mod_base = OTHER; note = Phosphorothioate linkage
  modified_base 11^12: mod_base = OTHER; note = Methylphosphonate linkage
  misc_feature 1..32: note = RM110239

SEQ ID NO: 448 - DNA, 32 bp, synthetic construct; identical to SEQ ID NO: 129
  source 1..32: mol_type = other DNA
  misc_feature 22..23: note = DNA
  misc_feature order(1..21,24..32): note = RNA
  modified_base 21: mod_base = OTHER; note = 2-Prime-O-Methoxyethyl modified nucleoside
  modified_base 22: mod_base = OTHER; note = DNA nucleotide carrying a 6-amino-5-nitro-3-yl-2(1H)-pyridone nucleobase
  modified_base order(7,9..10,12..13,25,28,30..31): mod_base = OTHER; note = 2-Prime-Fluoro modified nucleoside
  modified_base order(1..6,8,11,14..20,24,26..27,29,32): mod_base = OTHER; note = 2-Prime-O-Methyl modified nucleoside
  modified_base order(1^2,31^32): mod_base = OTHER; note = (1,3-dimethylimidazolidin-2-ylidene) Phosphoramidate linkage
  modified_base order(2..23,24..31): mod_base = OTHER; note = Phosphorothioate linkage
  modified_base 23^24: mod_base = OTHER; note = Methylphosphonate linkage
  misc_feature 1..32: note = RM110240

SEQ ID NO: 449 - DNA, 32 bp, synthetic construct; identical to SEQ ID NO: 19
  source 1..32: mol_type = other DNA
  misc_feature 19..20: note = DNA
  misc_feature order(1..18,21..32): note = RNA
  modified_base 18: mod_base = OTHER; note = 2-Prime-O-Methoxyethyl modified nucleoside
  modified_base 19: mod_base = OTHER; note = DNA nucleotide carrying a 6-amino-5-nitro-3-yl-2(1H)-pyridone nucleobase
  modified_base order(4,6..7,9..10,22,25,27..28): mod_base = OTHER; note = 2-Prime-Fluoro modified nucleoside
  modified_base order(1..3,5,8,11..17,21,23..24,26,29..32): mod_base = OTHER; note = 2-Prime-O-Methyl modified nucleoside
  modified_base order(1^2,31^32): mod_base = OTHER; note = (1,3-dimethylimidazolidin-2-ylidene) Phosphoramidate linkage
  modified_base order(2..20,21..31): mod_base = OTHER; note = Phosphorothioate linkage
  modified_base 20^21: mod_base = OTHER; note = Methylphosphonate linkage
  misc_feature 1..32: note = RM110241

SEQ ID NO: 450 - DNA, 32 bp, synthetic construct; identical to SEQ ID NO: 131
  source 1..32: mol_type = other DNA
  misc_feature 16..17: note = DNA
  misc_feature order(1..15,18..32): note = RNA
  modified_base 15: mod_base = OTHER; note = 2-Prime-O-Methoxyethyl modified nucleoside
  modified_base 16: mod_base = OTHER; note = DNA nucleotide carrying a 6-amino-5-nitro-3-yl-2(1H)-pyridone nucleobase
  modified_base order(1,3..4,6..7,19,22,24..25): mod_base = OTHER; note = 2-Prime-Fluoro modified nucleoside
  modified_base order(2,5,8..14,18,20..21,23,26..32): mod_base = OTHER; note = 2-Prime-O-Methyl modified nucleoside
  modified_base order(1^2,31^32): mod_base = OTHER; note = (1,3-dimethylimidazolidin-2-ylidene) Phosphoramidate linkage
  modified_base order(2..17,18..31): mod_base = OTHER; note = Phosphorothioate linkage
  modified_base 17^18: mod_base = OTHER; note = Methylphosphonate linkage
  misc_feature 1..32: note = RM110242

SEQ ID NO: 451 - DNA, 23 bp, synthetic construct
  source 1..23: mol_type = other DNA
  misc_feature 9..10: note = DNA
  misc_feature order(1..8,11..23): note = RNA
  modified_base 8: mod_base = OTHER; note = 2-Prime-O-Methoxyethyl modified nucleoside
  modified_base 9: mod_base = OTHER; note = DNA nucleotide carrying a 6-amino-5-nitro-3-yl-2(1H)-pyridone nucleobase
  modified_base order(3,5,12,20..21,23): mod_base = OTHER; note = 2-Prime-Fluoro modified nucleoside
  modified_base order(1..2,4,6..7,11,13..19,22): mod_base = OTHER; note = 2-Prime-O-Methyl modified nucleoside
  modified_base order(1^2,22^23): mod_base = OTHER; note = (1,3-dimethylimidazolidin-2-ylidene) Phosphoramidate linkage
  modified_base order(2..10,11..22): mod_base = OTHER; note = Phosphorothioate linkage
  modified_base 10^11: mod_base = OTHER; note = Methylphosphonate linkage
  misc_feature 1..23: note = RM110243
tctgaggantgggttcatttttc

SEQ ID NO: 452 - DNA, 32 bp, synthetic construct; identical to SEQ ID NO: 131
  source 1..32: mol_type = other DNA
  misc_feature 16..17: note = DNA
  misc_feature order(1..15,18..32): note = RNA
  modified_base 15: mod_base = OTHER; note = 2-Prime-O-Methoxyethyl modified nucleoside
  modified_base 16: mod_base = OTHER; note = DNA nucleotide carrying a 6-amino-5-nitro-3-yl-2(1H)-pyridone nucleobase
  modified_base order(10,12,19,27..28,30): mod_base = OTHER; note = 2-Prime-Fluoro modified nucleoside
  modified_base order(1..9,11,13..14,18,20..26,29,31..32): mod_base = OTHER; note = 2-Prime-O-Methyl modified nucleoside
  modified_base order(1^2,31^32): mod_base = OTHER; note = (1,3-dimethylimidazolidin-2-ylidene) Phosphoramidate linkage
  modified_base order(2..17,18..31): mod_base = OTHER; note = Phosphorothioate linkage
  modified_base 17^18: mod_base = OTHER; note = Methylphosphonate linkage
  misc_feature 1..32: note = RM110244

SEQ ID NO: 453 - DNA, 32 bp, synthetic construct; identical to SEQ ID NO: 132
  source 1..32: mol_type = other DNA
  misc_feature 13..14: note = DNA
  misc_feature order(1..12,15..32): note = RNA
  modified_base 12: mod_base = OTHER; note = 2-Prime-O-Methoxyethyl modified nucleoside
  modified_base 13: mod_base = OTHER; note = DNA nucleotide carrying a 6-amino-5-nitro-3-yl-2(1H)-pyridone nucleobase
  modified_base order(7,9,16,24..25,27): mod_base = OTHER; note = 2-Prime-Fluoro modified nucleoside
  modified_base order(1..6,8,10..11,15,17..23,26,28..32): mod_base = OTHER; note = 2-Prime-O-Methyl modified nucleoside
  modified_base order(1^2,31^32): mod_base = OTHER; note = (1,3-dimethylimidazolidin-2-ylidene) Phosphoramidate linkage
  modified_base order(2..14,15..31): mod_base = OTHER; note = Phosphorothioate linkage
  modified_base 14^15: mod_base = OTHER; note = Methylphosphonate linkage
  misc_feature 1..32: note = RM110245

SEQ ID NO: 454 - DNA, 32 bp, synthetic construct; identical to SEQ ID NO: 133
  source 1..32: mol_type = other DNA
  misc_feature 10..11: note = DNA
  misc_feature order(1..9,12..32): note = RNA
  modified_base 9: mod_base = OTHER; note = 2-Prime-O-Methoxyethyl modified nucleoside
  modified_base 10: mod_base = OTHER; note = DNA nucleotide carrying a 6-amino-5-nitro-3-yl-2(1H)-pyridone nucleobase
  modified_base order(4,6,13,21..22,24): mod_base = OTHER; note = 2-Prime-Fluoro modified nucleoside
  modified_base order(1..3,5,7..8,12,14..20,23,25..32): mod_base = OTHER; note = 2-Prime-O-Methyl modified nucleoside
  modified_base order(1^2,31^32): mod_base = OTHER; note = (1,3-dimethylimidazolidin-2-ylidene) Phosphoramidate linkage
  modified_base order(2..11,12..31): mod_base = OTHER; note = Phosphorothioate linkage
  modified_base 11^12: mod_base = OTHER; note = Methylphosphonate linkage
  misc_feature 1..32: note = RM110246

SEQ ID NO: 455 - DNA, 32 bp, synthetic construct; identical to SEQ ID NO: 134
  source 1..32: mol_type = other DNA
  misc_feature 7..8: note = DNA
  misc_feature order(1..6,9..32): note = RNA
  modified_base 6: mod_base = OTHER; note = 2-Prime-O-Methoxyethyl modified nucleoside
  modified_base 7: mod_base = OTHER; note = DNA nucleotide carrying a 6-amino-5-nitro-3-yl-2(1H)-pyridone nucleobase
  modified_base order(1,3,10,18..19,21): mod_base = OTHER; note = 2-Prime-Fluoro modified nucleoside
  modified_base order(2,4..5,9,11..17,20,22..32): mod_base = OTHER; note = 2-Prime-O-Methyl modified nucleoside
  modified_base order(1^2,31^32): mod_base = OTHER; note = (1,3-dimethylimidazolidin-2-ylidene) Phosphoramidate linkage
  modified_base order(2..8,9..31): mod_base = OTHER; note = Phosphorothioate linkage
  modified_base 8^9: mod_base = OTHER; note = Methylphosphonate linkage
  misc_feature 1..32: note = RM110247

SEQ ID NO: 456 - DNA, 23 bp, synthetic construct
  source 1..23: mol_type = other DNA
  misc_feature 15..16: note = DNA
  misc_feature order(1..14,17..23): note = RNA
  modified_base 14: mod_base = OTHER; note = 2-Prime-O-Methoxyethyl modified nucleoside
  modified_base 15: mod_base = OTHER; note = DNA nucleotide carrying a 6-amino-5-nitro-3-yl-2(1H)-pyridone nucleobase
  modified_base order(3,5..6,18,21,23): mod_base = OTHER; note = 2-Prime-Fluoro modified nucleoside
  modified_base order(1..2,4,7..13,17,19..20,22): mod_base = OTHER; note = 2-Prime-O-Methyl modified nucleoside
  modified_base order(1^2,22^23): mod_base = OTHER; note = (1,3-dimethylimidazolidin-2-ylidene) Phosphoramidate linkage
  modified_base order(2..16,17..22): mod_base = OTHER; note = Phosphorothioate linkage
  modified_base 16^17: mod_base = OTHER; note = Methylphosphonate linkage
  misc_feature 1..23: note = RM110248
caaacctctgaggantgggttca

SEQ ID NO: 457 - DNA, 32 bp, synthetic construct; identical to SEQ ID NO: 129
  source 1..32: mol_type = other DNA
  misc_feature 22..23: note = DNA
  misc_feature order(1..21,24..32): note = RNA
  modified_base 21: mod_base = OTHER; note = 2-Prime-O-Methoxyethyl modified nucleoside
  modified_base 22: mod_base = OTHER; note = DNA nucleotide carrying a 6-amino-5-nitro-3-yl-2(1H)-pyridone nucleobase
  modified_base order(10,12..13,25,28,30): mod_base = OTHER; note = 2-Prime-Fluoro modified nucleoside
  modified_base order(1..9,11,14..20,24,26..27,29,31..32): mod_base = OTHER; note = 2-Prime-O-Methyl modified nucleoside
  modified_base order(1^2,31^32): mod_base = OTHER; note = (1,3-dimethylimidazolidin-2-ylidene) Phosphoramidate linkage
  modified_base order(2..23,24..31): mod_base = OTHER; note = Phosphorothioate linkage
  modified_base 23^24: mod_base = OTHER; note = Methylphosphonate linkage
  misc_feature 1..32: note = RM110249

SEQ ID NO: 458 - DNA, 32 bp, synthetic construct; identical to SEQ ID NO: 19
  source 1..32: mol_type = other DNA
  misc_feature 19..20: note = DNA
  misc_feature order(1..18,21..32): note = RNA
  modified_base 18: mod_base = OTHER; note = 2-Prime-O-Methoxyethyl modified nucleoside
  modified_base 19: mod_base = OTHER; note = DNA nucleotide carrying a 6-amino-5-nitro-3-yl-2(1H)-pyridone nucleobase
  modified_base order(7,9..10,22,25,27): mod_base = OTHER; note = 2-Prime-Fluoro modified nucleoside
  modified_base order(1..6,8,11..17,21,23..24,26,28..32): mod_base = OTHER; note = 2-Prime-O-Methyl modified nucleoside
  modified_base order(1^2,31^32): mod_base = OTHER; note = (1,3-dimethylimidazolidin-2-ylidene) Phosphoramidate linkage
  modified_base order(2..20,21..31): mod_base = OTHER; note = Phosphorothioate linkage
  modified_base 20^21: mod_base = OTHER; note = Methylphosphonate linkage
  misc_feature 1..32: note = RM110250

SEQ ID NO: 459 - DNA, 32 bp, synthetic construct; identical to SEQ ID NO: 131
  source 1..32: mol_type = other DNA
  misc_feature 16..17: note = DNA
  misc_feature order(1..15,18..32): note = RNA
  modified_base 15: mod_base = OTHER; note = 2-Prime-O-Methoxyethyl modified nucleoside
  modified_base 16: mod_base = OTHER; note = DNA nucleotide carrying a 6-amino-5-nitro-3-yl-2(1H)-pyridone nucleobase
  modified_base order(4,6..7,19,22,24): mod_base = OTHER; note = 2-Prime-Fluoro modified nucleoside
  modified_base order(1..3,5,8..14,18,20..21,23,25..32): mod_base = OTHER; note = 2-Prime-O-Methyl modified nucleoside
  modified_base order(1^2,31^32): mod_base = OTHER; note = (1,3-dimethylimidazolidin-2-ylidene) Phosphoramidate linkage
  modified_base order(2..17,18..31): mod_base = OTHER; note = Phosphorothioate linkage
  modified_base 17^18: mod_base = OTHER; note = Methylphosphonate linkage
  misc_feature 1..32: note = RM110251

SEQ ID NO: 460 - DNA, 32 bp, synthetic construct; identical to SEQ ID NO: 132
  source 1..32: mol_type = other DNA
  misc_feature 13..14: note = DNA
  misc_feature order(1..12,15..32): note = RNA
  modified_base 12: mod_base = OTHER; note = 2-Prime-O-Methoxyethyl modified nucleoside
  modified_base 13: mod_base = OTHER; note = DNA nucleotide carrying a 6-amino-5-nitro-3-yl-2(1H)-pyridone nucleobase
  modified_base order(1,3..4,16,19,21): mod_base = OTHER; note = 2-Prime-Fluoro modified nucleoside
  modified_base order(2,5..11,15,17..18,20,22..32): mod_base = OTHER; note = 2-Prime-O-Methyl modified nucleoside
  modified_base order(1^2,31^32): mod_base = OTHER; note = (1,3-dimethylimidazolidin-2-ylidene) Phosphoramidate linkage
  modified_base order(2..14,15..31): mod_base = OTHER; note = Phosphorothioate linkage
  modified_base 14^15: mod_base = OTHER; note = Methylphosphonate linkage
  misc_feature 1..32: note = RM110252

SEQ ID NO: 461 - DNA, 32 bp, synthetic construct; identical to SEQ ID NO: 19
  source 1..32: mol_type = other DNA
  misc_feature 19..20: note = DNA
  misc_feature order(1..18,21..32): note = RNA
  modified_base 18: mod_base = OTHER; note = 2-Prime-O-Methoxyethyl modified nucleoside
  modified_base 19: mod_base = OTHER; note = DNA nucleotide carrying a 6-amino-5-nitro-3-yl-2(1H)-pyridone nucleobase
  modified_base order(15,22,30): mod_base = OTHER; note = 2-Prime-Fluoro modified nucleoside
  modified_base order(1..14,16..17,21,23..29,31..32): mod_base = OTHER; note = 2-Prime-O-Methyl modified nucleoside
  modified_base order(1^2,31^32): mod_base = OTHER; note = (1,3-dimethylimidazolidin-2-ylidene) Phosphoramidate linkage
  modified_base order(2..20,21..31): mod_base = OTHER; note = Phosphorothioate linkage
  modified_base 20^21: mod_base = OTHER; note = Methylphosphonate linkage
  misc_feature 1..32: note = RM110253

SEQ ID NO: 462 - DNA, 32 bp, synthetic construct; identical to SEQ ID NO: 131
  source 1..32: mol_type = other DNA
  misc_feature 16..17: note = DNA
  misc_feature order(1..15,18..32): note = RNA
  modified_base 15: mod_base = OTHER; note = 2-Prime-O-Methoxyethyl modified nucleoside
  modified_base 16: mod_base = OTHER; note = DNA nucleotide carrying a 6-amino-5-nitro-3-yl-2(1H)-pyridone nucleobase
  modified_base order(12,19,27): mod_base = OTHER; note = 2-Prime-Fluoro modified nucleoside
  modified_base order(1..11,13..14,18,20..26,28..32): mod_base = OTHER; note = 2-Prime-O-Methyl modified nucleoside
  modified_base order(1^2,31^32): mod_base = OTHER; note = (1,3-dimethylimidazolidin-2-ylidene) Phosphoramidate linkage
  modified_base order(2..17,18..31): mod_base = OTHER; note = Phosphorothioate linkage
  modified_base 17^18: mod_base = OTHER; note = Methylphosphonate linkage
  misc_feature 1..32: note = RM110254

SEQ ID NO: 463 - DNA, 32 bp, synthetic construct; identical to SEQ ID NO: 132
  source 1..32: mol_type = other DNA
  misc_feature 13..14: note = DNA
  misc_feature order(1..12,15..32): note = RNA
  modified_base 12: mod_base = OTHER; note = 2-Prime-O-Methoxyethyl modified nucleoside
  modified_base 13: mod_base = OTHER; note = DNA nucleotide carrying a 6-amino-5-nitro-3-yl-2(1H)-pyridone nucleobase
  modified_base order(9,16,24): mod_base = OTHER; note = 2-Prime-Fluoro modified nucleoside
  modified_base order(1..8,10..11,15,17..23,25..32): mod_base = OTHER; note = 2-Prime-O-Methyl modified nucleoside
  modified_base order(1^2,31^32): mod_base = OTHER; note = (1,3-dimethylimidazolidin-2-ylidene) Phosphoramidate linkage
  modified_base order(2..14,15..31): mod_base = OTHER; note = Phosphorothioate linkage
  modified_base 14^15: mod_base = OTHER; note = Methylphosphonate linkage
  misc_feature 1..32: note = RM110255

SEQ ID NO: 464 - DNA, 32 bp, synthetic construct; identical to SEQ ID NO: 133
  source 1..32: mol_type = other DNA
  misc_feature 10..11: note = DNA
  misc_feature order(1..9,12..32): note = RNA
  modified_base 9: mod_base = OTHER; note = 2-Prime-O-Methoxyethyl modified nucleoside
  modified_base 10: mod_base = OTHER; note = DNA nucleotide carrying a 6-amino-5-nitro-3-yl-2(1H)-pyridone nucleobase
  modified_base order(6,13,21): mod_base = OTHER; note = 2-Prime-Fluoro modified nucleoside
  modified_base order(1..5,7..8,12,14..20,22..32): mod_base = OTHER; note = 2-Prime-O-Methyl modified nucleoside
  modified_base order(1^2,31^32): mod_base = OTHER; note = (1,3-dimethylimidazolidin-2-ylidene) Phosphoramidate linkage
  modified_base order(2..11,12..31): mod_base = OTHER; note = Phosphorothioate linkage
  modified_base 11^12: mod_base = OTHER; note = Methylphosphonate linkage
  misc_feature 1..32: note = RM110256

SEQ ID NO: 465 - DNA, 32 bp, synthetic construct; identical to SEQ ID NO: 134
  source 1..32: mol_type = other DNA
  misc_feature 7..8: note = DNA
  misc_feature order(1..6,9..32): note = RNA
  modified_base 6: mod_base = OTHER; note = 2-Prime-O-Methoxyethyl modified nucleoside
  modified_base 7: mod_base = OTHER; note = DNA nucleotide carrying a 6-amino-5-nitro-3-yl-2(1H)-pyridone nucleobase
  modified_base order(3,10,18): mod_base = OTHER; note = 2-Prime-Fluoro modified nucleoside
  modified_base order(1..2,4..5,9,11..17,19..32): mod_base = OTHER; note = 2-Prime-O-Methyl modified nucleoside
  modified_base order(1^2,31^32): mod_base = OTHER; note = (1,3-dimethylimidazolidin-2-ylidene) Phosphoramidate linkage
  modified_base order(2..8,9..31): mod_base = OTHER; note = Phosphorothioate linkage
  modified_base 8^9: mod_base = OTHER; note = Methylphosphonate linkage
  misc_feature 1..32: note = RM110257

SEQ ID NO: 466 - DNA, 32 bp, synthetic construct; identical to SEQ ID NO: 128
  source 1..32: mol_type = other DNA
  misc_feature 25..26: note = DNA
  misc_feature order(1..24,27..32): note = RNA
  modified_base 24: mod_base = OTHER; note = 2-Prime-O-Methoxyethyl modified nucleoside
  modified_base 25: mod_base = OTHER; note = DNA nucleotide carrying a 6-amino-5-nitro-3-yl-2(1H)-pyridone nucleobase
  modified_base order(16,28,31): mod_base = OTHER; note = 2-Prime-Fluoro modified nucleoside
  modified_base order(1..15,17..23,27,29..30,32): mod_base = OTHER; note = 2-Prime-O-Methyl modified nucleoside
  modified_base order(1^2,31^32): mod_base = OTHER; note = (1,3-dimethylimidazolidin-2-ylidene) Phosphoramidate linkage
  modified_base order(2..26,27..31): mod_base = OTHER; note = Phosphorothioate linkage
  modified_base 26^27: mod_base = OTHER; note = Methylphosphonate linkage
  misc_feature 1..32: note = RM110258

SEQ ID NO: 467 - DNA, 32 bp, synthetic construct; identical to SEQ ID NO: 129
  source 1..32: mol_type = other DNA
  misc_feature 22..23: note = DNA
  misc_feature order(1..21,24..32): note = RNA
  modified_base 21: mod_base = OTHER; note = 2-Prime-O-Methoxyethyl modified nucleoside
  modified_base 22: mod_base = OTHER; note = DNA nucleotide carrying a 6-amino-5-nitro-3-yl-2(1H)-pyridone nucleobase
  modified_base order(13,25,28): mod_base = OTHER; note = 2-Prime-Fluoro modified nucleoside
  modified_base order(1..12,14..20,24,26..27,29..32): mod_base = OTHER; note = 2-Prime-O-Methyl modified nucleoside
  modified_base order(1^2,31^32): mod_base = OTHER; note = (1,3-dimethylimidazolidin-2-ylidene) Phosphoramidate linkage
  modified_base order(2..23,24..31): mod_base = OTHER; note = Phosphorothioate linkage
  modified_base 23^24: mod_base = OTHER; note = Methylphosphonate linkage
  misc_feature 1..32: note = RM110259

SEQ ID NO: 468 - DNA, 32 bp, synthetic construct; identical to SEQ ID NO: 19
  source 1..32: mol_type = other DNA
  misc_feature 19..20: note = DNA
  misc_feature order(1..18,21..32): note = RNA
  modified_base 18: mod_base = OTHER; note = 2-Prime-O-Methoxyethyl modified nucleoside
  modified_base 19: mod_base = OTHER; note = DNA nucleotide carrying a 6-amino-5-nitro-3-yl-2(1H)-pyridone nucleobase
  modified_base order(10,22,25): mod_base = OTHER; note = 2-Prime-Fluoro modified nucleoside
  modified_base order(1..9,11..17,21,23..24,26..32): mod_base = OTHER; note = 2-Prime-O-Methyl modified nucleoside
  modified_base order(1^2,31^32): mod_base = OTHER; note = (1,3-dimethylimidazolidin-2-ylidene) Phosphoramidate linkage
  modified_base order(2..20,21..31): mod_base = OTHER; note = Phosphorothioate linkage
  modified_base 20^21: mod_base = OTHER; note = Methylphosphonate linkage
  misc_feature 1..32: note = RM110260

SEQ ID NO: 469 - DNA, 32 bp, synthetic construct; identical to SEQ ID NO: 131
  source 1..32: mol_type = other DNA
  misc_feature 16..17: note = DNA
  misc_feature order(1..15,18..32): note = RNA
  modified_base 15: mod_base = OTHER; note = 2-Prime-O-Methoxyethyl modified nucleoside
  modified_base 16: mod_base = OTHER; note = DNA nucleotide carrying a 6-amino-5-nitro-3-yl-2(1H)-pyridone nucleobase
  modified_base order(7,19,22): mod_base = OTHER; note = 2-Prime-Fluoro modified nucleoside
  modified_base order(1..6,8..14,18,20..21,23..32): mod_base = OTHER; note = 2-Prime-O-Methyl modified nucleoside
  modified_base order(1^2,31^32): mod_base = OTHER; note = (1,3-dimethylimidazolidin-2-ylidene) Phosphoramidate linkage
  modified_base order(2..17,18..31): mod_base = OTHER; note = Phosphorothioate linkage
  modified_base 17^18: mod_base = OTHER; note = Methylphosphonate linkage
  misc_feature 1..32: note = RM110261

SEQ ID NO: 470 - DNA, 32 bp, synthetic construct; identical to SEQ ID NO: 132
  source 1..32: mol_type = other DNA
  misc_feature 13..14: note = DNA
  misc_feature order(1..12,15..32): note = RNA
  modified_base 12: mod_base = OTHER; note = 2-Prime-O-Methoxyethyl modified nucleoside
  modified_base 13: mod_base = OTHER; note = DNA nucleotide carrying a 6-amino-5-nitro-3-yl-2(1H)-pyridone nucleobase
  modified_base order(4,16,19): mod_base = OTHER; note = 2-Prime-Fluoro modified nucleoside
  modified_base order(1..3,5..11,15,17..18,20..32): mod_base = OTHER; note = 2-Prime-O-Methyl modified nucleoside
  modified_base order(1^2,31^32): mod_base = OTHER; note = (1,3-dimethylimidazolidin-2-ylidene) Phosphoramidate linkage
  modified_base order(2..14,15..31): mod_base = OTHER; note = Phosphorothioate linkage
  modified_base 14^15: mod_base = OTHER; note = Methylphosphonate linkage
  misc_feature 1..32: note = RM110262

SEQ ID NO: 471 - DNA, 32 bp, synthetic construct; identical to SEQ ID NO: 133
  source 1..32: mol_type = other DNA
  misc_feature 10..11: note = DNA
  misc_feature order(1..9,12..32): note = RNA
  modified_base 9: mod_base = OTHER; note = 2-Prime-O-Methoxyethyl modified nucleoside
  modified_base 10: mod_base = OTHER; note = DNA nucleotide carrying a 6-amino-5-nitro-3-yl-2(1H)-pyridone nucleobase
  modified_base order(1,13,16): mod_base = OTHER; note = 2-Prime-Fluoro modified nucleoside
  modified_base order(2..8,12,14..15,17..32): mod_base = OTHER; note = 2-Prime-O-Methyl modified nucleoside
  modified_base order(1^2,31^32): mod_base = OTHER; note = (1,3-dimethylimidazolidin-2-ylidene) Phosphoramidate linkage
  modified_base order(2..11,12..31): mod_base = OTHER; note = Phosphorothioate linkage
  modified_base 11^12: mod_base = OTHER; note = Methylphosphonate linkage
  misc_feature 1..32: note = RM110263

SEQ ID NO: 472 - DNA, 29 bp, synthetic construct
  source 1..29: mol_type = other DNA
  misc_feature 18..19: note = DNA
  misc_feature order(1..17,20..29): note = RNA
  modified_base 17: mod_base = OTHER; note = 2-Prime-O-Methoxyethyl modified nucleoside
  modified_base 18: mod_base = OTHER; note = DNA nucleotide carrying a 6-amino-5-nitro-3-yl-2(1H)-pyridone nucleobase
  modified_base order(5,9,11,16,21,23..24,27): mod_base = OTHER; note = 2-Prime-Fluoro modified nucleoside
  modified_base order(1..4,6..8,10,12..15,20,22,25..26,28..29): mod_base = OTHER; note = 2-Prime-O-Methyl modified nucleoside
  modified_base order(1^2,28^29): mod_base = OTHER; note = (1,3-dimethylimidazolidin-2-ylidene) Phosphoramidate linkage
  modified_base order(2..19,20..28): mod_base = OTHER; note = Phosphorothioate linkage
  modified_base 19^20: mod_base = OTHER; note = Methylphosphonate linkage
  misc_feature 1..29: note = RM110264
ggtcaaacctctgaggantgggttcattt

SEQ ID NO: 473 - DNA, 29 bp, synthetic construct
  source 1..29: mol_type = other DNA
  misc_feature 15..16: note = DNA
  misc_feature order(1..14,17..29): note = RNA
  modified_base 14: mod_base = OTHER; note = 2-Prime-O-Methoxyethyl modified nucleoside
  modified_base 15: mod_base = OTHER; note = DNA nucleotide carrying a 6-amino-5-nitro-3-yl-2(1H)-pyridone nucleobase
  modified_base order(2,6,8,13,18,20..21,24): mod_base = OTHER; note = 2-Prime-Fluoro modified nucleoside
  modified_base order(1,3..5,7,9..12,17,19,22..23,25..29): mod_base = OTHER; note = 2-Prime-O-Methyl modified nucleoside
  modified_base order(1^2,28^29): mod_base = OTHER; note = (1,3-dimethylimidazolidin-2-ylidene) Phosphoramidate linkage
  modified_base order(2..16,17..28): mod_base = OTHER; note = Phosphorothioate linkage
  modified_base 16^17: mod_base = OTHER; note = Methylphosphonate linkage
  misc_feature 1..29: note = RM110265
caaacctctgaggantgggttcatttttc

SEQ ID NO: 474 - DNA, 29 bp, synthetic construct
  source 1..29: mol_type = other DNA
  misc_feature 12..13: note = DNA
  misc_feature order(1..11,14..29): note = RNA
  modified_base 11: mod_base = OTHER; note = 2-Prime-O-Methoxyethyl modified nucleoside
  modified_base 12: mod_base = OTHER; note = DNA nucleotide carrying a 6-amino-5-nitro-3-yl-2(1H)-pyridone nucleobase
  modified_base order(5,8..9,15..16,21,23,27): mod_base = OTHER; note = 2-Prime-Fluoro modified nucleoside
  modified_base order(1..4,6..7,10,14,17..20,22,24..26,28..29): mod_base = OTHER; note = 2-Prime-O-Methyl modified nucleoside
  modified_base order(1^2,28^29): mod_base = OTHER; note = (1,3-dimethylimidazolidin-2-ylidene) Phosphoramidate linkage
  modified_base order(2..13,14..28): mod_base = OTHER; note = Phosphorothioate linkage
  modified_base 13^14: mod_base = OTHER; note = Methylphosphonate linkage
  misc_feature 1..29: note = RM110266
acctctgaggantgggttcatttttcttg

SEQ ID NO: 475 - DNA, 29 bp, synthetic construct
  source 1..29: mol_type = other DNA
  misc_feature 9..10: note = DNA
  misc_feature order(1..8,11..29): note = RNA
  modified_base 8: mod_base = OTHER; note = 2-Prime-O-Methoxyethyl modified nucleoside
  modified_base 9: mod_base = OTHER; note = DNA nucleotide carrying a 6-amino-5-nitro-3-yl-2(1H)-pyridone nucleobase
  modified_base order(2,5..6,12..13,18,20,24): mod_base = OTHER; note = 2-Prime-Fluoro modified nucleoside
  modified_base order(1,3..4,7,11,14..17,19,21..23,25..29): mod_base = OTHER; note = 2-Prime-O-Methyl modified nucleoside
  modified_base order(1^2,28^29): mod_base = OTHER; note = (1,3-dimethylimidazolidin-2-ylidene) Phosphoramidate linkage
  modified_base order(2..10,11..28): mod_base = OTHER; note = Phosphorothioate linkage
  modified_base 10^11: mod_base = OTHER; note = Methylphosphonate linkage
  misc_feature 1..29: note = RM110267
tctgaggantgggttcatttttcttgtct

SEQ ID NO: 476 - DNA, 26 bp, synthetic construct
  source 1..26: mol_type = other DNA
  misc_feature 22..23: note = DNA
  misc_feature order(1..21,24..26): note = RNA
  modified_base 21: mod_base = OTHER; note = 2-Prime-O-Methoxyethyl modified nucleoside
  modified_base 22: mod_base = OTHER; note = DNA nucleotide carrying a 6-amino-5-nitro-3-yl-2(1H)-pyridone nucleobase
  modified_base order(9,13,15,20,25): mod_base = OTHER; note = 2-Prime-Fluoro modified nucleoside
  modified_base order(1..8,10..12,14,16..19,24,26): mod_base = OTHER; note = 2-Prime-O-Methyl modified nucleoside
  modified_base order(1^2,25^26): mod_base = OTHER; note = (1,3-dimethylimidazolidin-2-ylidene) Phosphoramidate linkage
  modified_base order(2..23,24^25): mod_base = OTHER; note = Phosphorothioate linkage
  modified_base 23^24: mod_base = OTHER; note = Methylphosphonate linkage
  misc_feature 1..26: note = RM110268
attcggtcaaacctctgaggantggg

SEQ ID NO: 477 - DNA, 26 bp, synthetic construct
  source 1..26: mol_type = other DNA
  misc_feature 19..20: note = DNA
  misc_feature order(1..18,21..26): note = RNA
  modified_base 18: mod_base = OTHER; note = 2-Prime-O-Methoxyethyl modified nucleoside
  modified_base 19: mod_base = OTHER; note = DNA nucleotide carrying a 6-amino-5-nitro-3-yl-2(1H)-pyridone nucleobase
  modified_base order(6,10,12,17,22): mod_base = OTHER; note = 2-Prime-Fluoro modified nucleoside
  modified_base order(1..5,7..9,11,13..16,21,23..26): mod_base = OTHER; note = 2-Prime-O-Methyl modified nucleoside
  modified_base order(1^2,25^26): mod_base = OTHER; note = (1,3-dimethylimidazolidin-2-ylidene) Phosphoramidate linkage
  modified_base order(2..20,21..25): mod_base = OTHER; note = Phosphorothioate linkage
  modified_base 20^21: mod_base = OTHER; note = Methylphosphonate linkage
  misc_feature 1..26: note = RM110269
cggtcaaacctctgaggantgggttc

SEQ ID NO: 478 - DNA, 26 bp, synthetic construct
  source 1..26: mol_type = other DNA
  misc_feature 16..17: note = DNA
  misc_feature order(1..15,18..26): note = RNA
  modified_base 15: mod_base = OTHER; note = 2-Prime-O-Methoxyethyl modified nucleoside
  modified_base 16: mod_base = OTHER; note = DNA nucleotide carrying a 6-amino-5-nitro-3-yl-2(1H)-pyridone nucleobase
  modified_base order(3,7,9,14,19): mod_base = OTHER; note = 2-Prime-Fluoro modified nucleoside
  modified_base order(1..2,4..6,8,10..13,18,20..26): mod_base = OTHER; note = 2-Prime-O-Methyl modified nucleoside
  modified_base order(1^2,25^26): mod_base = OTHER; note = (1,3-dimethylimidazolidin-2-ylidene) Phosphoramidate linkage
  modified_base order(2..17,18..25): mod_base = OTHER; note = Phosphorothioate linkage
  modified_base 17^18: mod_base = OTHER; note = Methylphosphonate linkage
  misc_feature 1..26: note = RM110270
tcaaacctctgaggantgggttcatt

SEQ ID NO: 479 - DNA, 29 bp, synthetic construct
  source 1..29: mol_type = other DNA
  misc_feature 24..25: note = DNA
  misc_feature order(1..23,26..29): note = RNA
  modified_base 23: mod_base = OTHER; note = 2-Prime-O-Methoxyethyl modified nucleoside
  modified_base 24: mod_base = OTHER; note = DNA nucleotide carrying a 6-amino-5-nitro-3-yl-2(1H)-pyridone nucleobase
  modified_base order(11,15,17,22,27): mod_base = OTHER; note = 2-Prime-Fluoro modified nucleoside
  modified_base order(1..10,12..14,16,18..21,26,28..29): mod_base = OTHER; note = 2-Prime-O-Methyl modified nucleoside
  modified_base order(1^2,28^29): mod_base = OTHER; note = (1,3-dimethylimidazolidin-2-ylidene) Phosphoramidate linkage
  modified_base order(2..25,26..28): mod_base = OTHER; note = Phosphorothioate linkage
  modified_base 25^26: mod_base = OTHER; note = Methylphosphonate linkage
  misc_feature 1..29: note = RM110271
caattcggtcaaacctctgaggantgggt

SEQ ID NO: 480 - DNA, 29 bp, synthetic construct
  source 1..29: mol_type = other DNA
  misc_feature 21..22: note = DNA
  misc_feature order(1..20,23..29): note = RNA
  modified_base 20: mod_base = OTHER; note = 2-Prime-O-Methoxyethyl modified nucleoside
  modified_base 21: mod_base = OTHER; note = DNA nucleotide carrying a 6-amino-5-nitro-3-yl-2(1H)-pyridone nucleobase
  modified_base order(8,12,14,19,24): mod_base = OTHER; note = 2-Prime-Fluoro modified nucleoside
  modified_base order(1..7,9..11,13,15..18,23,25..29): mod_base = OTHER; note = 2-Prime-O-Methyl modified nucleoside
  modified_base order(1^2,28^29): mod_base = OTHER; note = (1,3-dimethylimidazolidin-2-ylidene) Phosphoramidate linkage
  modified_base order(2..22,23..28): mod_base = OTHER; note = Phosphorothioate linkage
  modified_base 22^23: mod_base = OTHER; note = Methylphosphonate linkage
  misc_feature 1..29: note = RM110272
ttcggtcaaacctctgaggantgggttca

SEQ ID NO: 481 - DNA, 29 bp, synthetic construct
  source 1..29: mol_type = other DNA
  misc_feature 18..19: note = DNA
  misc_feature order(1..17,20..29): note = RNA
  modified_base 17: mod_base = OTHER; note = 2-Prime-O-Methoxyethyl modified nucleoside
  modified_base 18: mod_base = OTHER; note = DNA nucleotide carrying a 6-amino-5-nitro-3-yl-2(1H)-pyridone nucleobase
  modified_base order(5,9,11,16,21): mod_base = OTHER; note = 2-Prime-Fluoro modified nucleoside
  modified_base order(1..4,6..8,10,12..15,20,22..29): mod_base = OTHER; note = 2-Prime-O-Methyl modified nucleoside
  modified_base order(1^2,28^29): mod_base = OTHER; note = (1,3-dimethylimidazolidin-2-ylidene) Phosphoramidate linkage
  modified_base order(2..19,20..28): mod_base = OTHER; note = Phosphorothioate linkage
  modified_base 19^20: mod_base = OTHER; note = Methylphosphonate linkage
  misc_feature 1..29: note = RM110273
ggtcaaacctctgaggantgggttcattt

SEQ ID NO: 482 - DNA, 29 bp, synthetic construct
  source 1..29: mol_type = other DNA
  misc_feature 15..16: note = DNA
  misc_feature order(1..14,17..29): note = RNA
  modified_base 14: mod_base = OTHER; note = 2-Prime-O-Methoxyethyl modified nucleoside
  modified_base 15: mod_base = OTHER; note = DNA nucleotide carrying a 6-amino-5-nitro-3-yl-2(1H)-pyridone nucleobase
  modified_base order(2,6,8,13,18): mod_base = OTHER; note = 2-Prime-Fluoro modified nucleoside
  modified_base order(1,3..5,7,9..12,17,19..29): mod_base = OTHER; note = 2-Prime-O-Methyl modified nucleoside
  modified_base order(1^2,28^29): mod_base = OTHER; note = (1,3-dimethylimidazolidin-2-ylidene) Phosphoramidate linkage
  modified_base order(2..16,17..28): mod_base = OTHER; note = Phosphorothioate linkage
  modified_base 16^17: mod_base = OTHER; note = Methylphosphonate linkage
  misc_feature 1..29: note = RM110274
caaacctctgaggantgggttcatttttc

SEQ ID NO: 483 - DNA, 29 bp, synthetic construct
  source 1..29: mol_type = other DNA
  misc_feature 9..10: note = DNA
  misc_feature order(1..8,11..29): note = RNA
  modified_base 8: mod_base = OTHER; note = 2-Prime-O-Methoxyethyl modified nucleoside
  modified_base 9: mod_base = OTHER; note = DNA nucleotide carrying a 6-amino-5-nitro-3-yl-2(1H)-pyridone nucleobase
  modified_base order(3,12,15,17,19,26..27,29): mod_base = OTHER; note = 2-Prime-Fluoro modified nucleoside
  modified_base order(1..2,4..7,11,13..14,16,18,20..25,28): mod_base = OTHER; note = 2-Prime-O-Methyl modified nucleoside
  modified_base order(1^2,28^29): mod_base = OTHER; note = (1,3-dimethylimidazolidin-2-ylidene) Phosphoramidate linkage
  modified_base order(2..10,11..28): mod_base = OTHER; note = Phosphorothioate linkage
  modified_base 10^11: mod_base = OTHER; note = Methylphosphonate linkage
  misc_feature 1..29: note = RM110275
tctgaggantgggttcatttttcttgtct

SEQ ID NO: 484 - DNA, 29 bp, synthetic construct
  source 1..29: mol_type = other DNA
  misc_feature 21..22: note = DNA
  misc_feature order(1..20,23..29): note = RNA
  modified_base 20: mod_base = OTHER; note = 2-Prime-O-Methoxyethyl modified nucleoside
  modified_base 21: mod_base = OTHER; note = DNA nucleotide carrying a 6-amino-5-nitro-3-yl-2(1H)-pyridone nucleobase
  modified_base order(3,5..6,13,15,17,24,29): mod_base = OTHER; note = 2-Prime-Fluoro modified nucleoside
  modified_base order(1..2,4,7..12,14,16,18..19,23,25..28): mod_base = OTHER; note = 2-Prime-O-Methyl modified nucleoside
  modified_base order(1^2,28^29): mod_base = OTHER; note = (1,3-dimethylimidazolidin-2-ylidene) Phosphoramidate linkage
  modified_base order(2..22,23..28): mod_base = OTHER; note = Phosphorothioate linkage
  modified_base 22^23: mod_base = OTHER; note = Methylphosphonate linkage
  misc_feature 1..29: note = RM110276
ttcggtcaaacctctgaggantgggttca

SEQ ID NO: 485 - DNA, 26 bp, synthetic construct
  source 1..26: mol_type = other DNA
  misc_feature 16..17: note = DNA
  misc_feature order(1..15,18..26): note = RNA
  modified_base 15: mod_base = OTHER; note = 2-Prime-O-Methoxyethyl modified nucleoside
  modified_base 16: mod_base = OTHER; note = DNA nucleotide carrying a 6-amino-5-nitro-3-yl-2(1H)-pyridone nucleobase
  modified_base order(10,19,22,24,26): mod_base = OTHER; note = 2-Prime-Fluoro modified nucleoside
  modified_base order(1..9,11..14,18,20..21,23,25): mod_base = OTHER; note = 2-Prime-O-Methyl modified nucleoside
  modified_base order(1^2,25^26): mod_base = OTHER; note = (1,3-dimethylimidazolidin-2-ylidene) Phosphoramidate linkage
  modified_base order(2..17,18..25): mod_base = OTHER; note = Phosphorothioate linkage
  modified_base 17^18: mod_base = OTHER; note = Methylphosphonate linkage
  misc_feature 1..26: note = RM110277
tcaaacctctgaggantgggttcatt

SEQ ID NO: 486 - DNA, 26 bp, synthetic construct
  source 1..26: mol_type = other DNA
  misc_feature 13..14: note = DNA
  misc_feature order(1..12,15..26): note = RNA
  modified_base 12: mod_base = OTHER; note = 2-Prime-O-Methoxyethyl modified nucleoside
  modified_base 13: mod_base = OTHER; note = DNA nucleotide carrying a 6-amino-5-nitro-3-yl-2(1H)-pyridone nucleobase
  modified_base order(7,16,19,21,23): mod_base = OTHER; note = 2-Prime-Fluoro modified nucleoside
  modified_base order(1..6,8..11,15,17..18,20,22,24..26): mod_base = OTHER; note = 2-Prime-O-Methyl modified nucleoside
  modified_base order(1^2,25^26): mod_base = OTHER; note = (1,3-dimethylimidazolidin-2-ylidene) Phosphoramidate linkage
  modified_base order(2..14,15..25): mod_base = OTHER; note = Phosphorothioate linkage
  modified_base 14^15: mod_base = OTHER; note = Methylphosphonate linkage
  misc_feature 1..26: note = RM110278
aacctctgaggantgggttcattttt

SEQ ID NO: 487 - DNA, 26 bp, synthetic construct
  source 1..26: mol_type = other DNA
  misc_feature 10..11: note = DNA
  misc_feature order(1..9,12..26): note = RNA
  modified_base 9: mod_base = OTHER; note = 2-Prime-O-Methoxyethyl modified nucleoside
  modified_base 10: mod_base = OTHER; note = DNA nucleotide carrying a 6-amino-5-nitro-3-yl-2(1H)-pyridone nucleobase
  modified_base order(4,13,16,18,20): mod_base = OTHER; note = 2-Prime-Fluoro modified nucleoside
  modified_base order(1..3,5..8,12,14..15,17,19,21..26): mod_base = OTHER; note = 2-Prime-O-Methyl modified nucleoside
  modified_base order(1^2,25^26): mod_base = OTHER; note = (1,3-dimethylimidazolidin-2-ylidene) Phosphoramidate linkage
  modified_base order(2..11,12..25): mod_base = OTHER; note = Phosphorothioate linkage
  modified_base 11^12: mod_base = OTHER; note = Methylphosphonate linkage
  misc_feature 1..26: note = RM110279
ctctgaggantgggttcatttttctt

SEQ ID NO: 488 - DNA, 26 bp, synthetic construct
  source 1..26: mol_type = other DNA
  misc_feature 7..8: note = DNA
  misc_feature order(1..6,9..26): note = RNA
  modified_base 6: mod_base = OTHER; note = 2-Prime-O-Methoxyethyl modified nucleoside
  modified_base 7: mod_base = OTHER; note = DNA nucleotide carrying a 6-amino-5-nitro-3-yl-2(1H)-pyridone nucleobase
  modified_base order(1,10,13,15,17): mod_base = OTHER; note = 2-Prime-Fluoro modified nucleoside
  modified_base order(2..5,9,11..12,14,16,18..26): mod_base = OTHER; note = 2-Prime-O-Methyl modified nucleoside
  modified_base order(1^2,25^26): mod_base = OTHER; note = (1,3-dimethylimidazolidin-2-ylidene) Phosphoramidate linkage
  modified_base order(2..8,9..25): mod_base = OTHER; note = Phosphorothioate linkage
  modified_base 8^9: mod_base = OTHER; note = Methylphosphonate linkage
  misc_feature 1..26: note = RM110280
tgaggantgggttcatttttcttgtc

SEQ ID NO: 489 - DNA, 29 bp, synthetic construct
  source 1..29: mol_type = other DNA
  misc_feature 18..19: note = DNA
  misc_feature order(1..17,20..29): note = RNA
  modified_base 17: mod_base = OTHER; note = 2-Prime-O-Methoxyethyl modified nucleoside
  modified_base 18: mod_base = OTHER; note = DNA nucleotide carrying a 6-amino-5-nitro-3-yl-2(1H)-pyridone nucleobase
  modified_base order(12,21,24,26,28): mod_base = OTHER; note = 2-Prime-Fluoro modified nucleoside
  modified_base order(1..11,13..16,20,22..23,25,27,29): mod_base = OTHER; note = 2-Prime-O-Methyl modified nucleoside
  modified_base order(1^2,28^29): mod_base = OTHER; note = (1,3-dimethylimidazolidin-2-ylidene) Phosphoramidate linkage
  modified_base order(2..19,20..28): mod_base = OTHER; note = Phosphorothioate linkage
  modified_base 19^20: mod_base = OTHER; note = Methylphosphonate linkage
  misc_feature 1..29: note = RM110281
ggtcaaacctctgaggantgggttcattt

SEQ ID NO: 490 - DNA, 29 bp, synthetic construct
  source 1..29: mol_type = other DNA
  misc_feature 15..16: note = DNA
  misc_feature order(1..14,17..29): note = RNA
  modified_base 14: mod_base = OTHER; note = 2-Prime-O-Methoxyethyl modified nucleoside
  modified_base 15: mod_base = OTHER; note = DNA nucleotide carrying a 6-amino-5-nitro-3-yl-2(1H)-pyridone nucleobase
  modified_base order(9,18,21,23,25): mod_base = OTHER; note = 2-Prime-Fluoro modified nucleoside
  modified_base order(1..8,10..13,17,19..20,22,24,26..29): mod_base = OTHER; note = 2-Prime-O-Methyl modified nucleoside
  modified_base order(1^2,28^29): mod_base = OTHER; note = (1,3-dimethylimidazolidin-2-ylidene) Phosphoramidate linkage
  modified_base order(2..16,17..28): mod_base = OTHER; note = Phosphorothioate linkage
  modified_base 16^17: mod_base = OTHER; note = Methylphosphonate linkage
  misc_feature 1..29: note = RM110282
caaacctctgaggantgggttcatttttc

SEQ ID NO: 491 - DNA, 29 bp, synthetic construct
  source 1..29: mol_type = other DNA
  misc_feature 12..13: note = DNA
  misc_feature order(1..11,14..29): note = RNA
  modified_base 11: mod_base = OTHER; note = 2-Prime-O-Methoxyethyl modified nucleoside
  modified_base 12: mod_base = OTHER; note = DNA nucleotide carrying a 6-amino-5-nitro-3-yl-2(1H)-pyridone nucleobase
  modified_base order(6,15,18,20,22): mod_base = OTHER; note = 2-Prime-Fluoro modified nucleoside
  modified_base order(1..5,7..10,14,16..17,19,21,23..29): mod_base = OTHER; note = 2-Prime-O-Methyl modified nucleoside
  modified_base order(1^2,28^29): mod_base = OTHER; note = (1,3-dimethylimidazolidin-2-ylidene) Phosphoramidate linkage
  modified_base order(2..13,14..28): mod_base = OTHER; note = Phosphorothioate linkage
  modified_base 13^14: mod_base = OTHER; note = Methylphosphonate linkage
  misc_feature 1..29: note = RM110283
acctctgaggantgggttcatttttcttg

SEQ ID NO: 492 - DNA, 29 bp, synthetic construct
  source 1..29: mol_type = other DNA
  misc_feature 9..10: note = DNA
  misc_feature order(1..8,11..29): note = RNA
  modified_base 8: mod_base = OTHER; note = 2-Prime-O-Methoxyethyl modified nucleoside
  modified_base 9: mod_base = OTHER; note = DNA nucleotide carrying a 6-amino-5-nitro-3-yl-2(1H)-pyridone nucleobase
  modified_base order(3,12,15,17,19): mod_base = OTHER; note = 2-Prime-Fluoro modified nucleoside
  modified_base order(1..2,4..7,11,13..14,16,18,20..29): mod_base = OTHER; note = 2-Prime-O-Methyl modified nucleoside
  modified_base order(1^2,28^29): mod_base = OTHER; note = (1,3-dimethylimidazolidin-2-ylidene) Phosphoramidate linkage
  modified_base order(2..10,11..28): mod_base = OTHER; note = Phosphorothioate linkage
  modified_base 10^11: mod_base = OTHER; note = Methylphosphonate linkage
  misc_feature 1..29: note = RM110284
tctgaggantgggttcatttttcttgtct

SEQ ID NO: 493 - DNA, 26 bp, synthetic construct
  source 1..26: mol_type = other DNA
  misc_feature 16..17: note = DNA
  misc_feature order(1..15,18..26): note = RNA
  modified_base 15: mod_base = OTHER; note = 2-Prime-O-Methoxyethyl modified nucleoside
  modified_base 16: mod_base = OTHER; note = DNA nucleotide carrying a 6-amino-5-nitro-3-yl-2(1H)-pyridone nucleobase
  modified_base order(8,10,12,19,24): mod_base = OTHER; note = 2-Prime-Fluoro modified nucleoside
  modified_base order(1..7,9,11,13..14,18,20..23,25..26): mod_base = OTHER; note = 2-Prime-O-Methyl modified nucleoside
  modified_base order(1^2,25^26): mod_base = OTHER; note = (1,3-dimethylimidazolidin-2-ylidene) Phosphoramidate linkage
  modified_base order(2..17,18..25): mod_base = OTHER; note = Phosphorothioate linkage
  modified_base 17^18: mod_base = OTHER; note = Methylphosphonate linkage
  misc_feature 1..26: note = RM110285
tcaaacctctgaggantgggttcatt

SEQ ID NO: 494 - DNA, 26 bp, synthetic construct
  source 1..26: mol_type = other DNA
  misc_feature 13..14: note = DNA
  misc_feature order(1..12,15..26): note = RNA
  modified_base 12: mod_base = OTHER; note = 2-Prime-O-Methoxyethyl modified nucleoside
  modified_base 13: mod_base = OTHER; note = DNA nucleotide carrying a 6-amino-5-nitro-3-yl-2(1H)-pyridone nucleobase
  modified_base order(5,7,9,16,21): mod_base = OTHER; note = 2-Prime-Fluoro modified nucleoside
  modified_base order(1..4,6,8,10..11,15,17..20,22..26): mod_base = OTHER; note = 2-Prime-O-Methyl modified nucleoside
  modified_base order(1^2,25^26): mod_base = OTHER; note = (1,3-dimethylimidazolidin-2-ylidene) Phosphoramidate linkage
  modified_base order(2..14,15..25): mod_base = OTHER; note = Phosphorothioate linkage
  modified_base 14^15: mod_base = OTHER; note = Methylphosphonate linkage
  misc_feature 1..26: note = RM110286
aacctctgaggantgggttcattttt

SEQ ID NO: 495 - DNA, 26 bp, synthetic construct
  source 1..26: mol_type = other DNA
  misc_feature 10..11: note = DNA
  misc_feature order(1..9,12..26): note = RNA
  modified_base 9: mod_base = OTHER; note = 2-Prime-O-Methoxyethyl modified nucleoside
  modified_base 10: mod_base = OTHER; note = DNA nucleotide carrying a 6-amino-5-nitro-3-yl-2(1H)-pyridone nucleobase
  modified_base order(2,4,6,13,18): mod_base = OTHER; note = 2-Prime-Fluoro modified nucleoside
  modified_base order(1,3,5,7..8,12,14..17,19..26): mod_base = OTHER; note = 2-Prime-O-Methyl modified nucleoside
  modified_base order(1^2,25^26): mod_base = OTHER; note = (1,3-dimethylimidazolidin-2-ylidene) Phosphoramidate linkage
  modified_base order(2..11,12..25): mod_base = OTHER; note = Phosphorothioate linkage
  modified_base 11^12: mod_base = OTHER; note = Methylphosphonate linkage
  misc_feature 1..26: note = RM110287
ctctgaggantgggttcatttttctt

SEQ ID NO: 496 - DNA, 29 bp, synthetic construct
  source 1..29: mol_type = other DNA
  misc_feature 21..22: note = DNA
  misc_feature order(1..20,23..29): note = RNA
  modified_base 20: mod_base = OTHER; note = 2-Prime-O-Methoxyethyl modified nucleoside
  modified_base 21: mod_base = OTHER; note = DNA nucleotide carrying a 6-amino-5-nitro-3-yl-2(1H)-pyridone nucleobase
  modified_base order(13,15,17,24,29): mod_base = OTHER; note = 2-Prime-Fluoro modified nucleoside
  modified_base order(1..12,14,16,18..19,23,25..28): mod_base = OTHER; note = 2-Prime-O-Methyl modified nucleoside
  modified_base order(1^2,28^29): mod_base = OTHER; note = (1,3-dimethylimidazolidin-2-ylidene) Phosphoramidate linkage
  modified_base order(2..22,23..28): mod_base = OTHER; note = Phosphorothioate linkage
  modified_base 22^23: mod_base = OTHER; note = Methylphosphonate linkage
  misc_feature 1..29: note = RM110288
ttcggtcaaacctctgaggantgggttca

SEQ ID NO: 497 - DNA, 29 bp, synthetic construct
  source 1..29: mol_type = other DNA
  misc_feature 18..19: note = DNA
  misc_feature order(1..17,20..29): note = RNA
  modified_base 17: mod_base = OTHER; note = 2-Prime-O-Methoxyethyl modified nucleoside
  modified_base 18: mod_base = OTHER; note = DNA nucleotide carrying a 6-amino-5-nitro-3-yl-2(1H)-pyridone nucleobase
  modified_base order(10,12,14,21,26): mod_base = OTHER; note = 2-Prime-Fluoro modified nucleoside
  modified_base order(1..9,11,13,15..16,20,22..25,27..29): mod_base = OTHER; note = 2-Prime-O-Methyl modified nucleoside
  modified_base order(1^2,28^29): mod_base = OTHER; note = (1,3-dimethylimidazolidin-2-ylidene) Phosphoramidate linkage
  modified_base order(2..19,20..28): mod_base = OTHER; note = Phosphorothioate linkage
  modified_base 19^20: mod_base = OTHER; note = Methylphosphonate linkage
  misc_feature 1..29: note = RM110289
ggtcaaacctctgaggantgggttcattt

SEQ ID NO: 498 - DNA, 29 bp, synthetic construct
  source 1..29: mol_type = other DNA
  misc_feature 15..16: note = DNA
  misc_feature order(1..14,17..29): note = RNA
  modified_base 14: mod_base = OTHER; note = 2-Prime-O-Methoxyethyl modified nucleoside
  modified_base 15: mod_base = OTHER; note = DNA nucleotide carrying a 6-amino-5-nitro-3-yl-2(1H)-pyridone nucleobase
  modified_base order(7,9,11,18,23): mod_base = OTHER; note = 2-Prime-Fluoro modified nucleoside
  modified_base order(1..6,8,10,12..13,17,19..22,24..29): mod_base = OTHER; note = 2-Prime-O-Methyl modified nucleoside
  modified_base order(1^2,28^29): mod_base = OTHER; note = (1,3-dimethylimidazolidin-2-ylidene) Phosphoramidate linkage
  modified_base order(2..16,17..28): mod_base = OTHER; note = Phosphorothioate linkage
  modified_base 16^17: mod_base = OTHER; note = Methylphosphonate linkage
  misc_feature 1..29: note = RM110290
caaacctctgaggantgggttcatttttc

SEQ ID NO: 499 - DNA, 29 bp, synthetic construct
  source 1..29: mol_type = other DNA
  misc_feature 12..13: note = DNA
  misc_feature order(1..11,14..29): note = RNA
  modified_base 11: mod_base = OTHER; note = 2-Prime-O-Methoxyethyl modified nucleoside
  modified_base 12: mod_base = OTHER; note = DNA nucleotide carrying a 6-amino-5-nitro-3-yl-2(1H)-pyridone nucleobase
  modified_base order(4,6,8,15,20): mod_base = OTHER; note = 2-Prime-Fluoro modified nucleoside
  modified_base order(1..3,5,7,9..10,14,16..19,21..29): mod_base = OTHER; note = 2-Prime-O-Methyl modified nucleoside
  modified_base order(1^2,28^29): mod_base = OTHER; note = (1,3-dimethylimidazolidin-2-ylidene) Phosphoramidate linkage
  modified_base order(2..13,14..28): mod_base = OTHER; note = Phosphorothioate linkage
  modified_base 13^14: mod_base = OTHER; note = Methylphosphonate linkage
  misc_feature 1..29: note = RM110291
acctctgaggantgggttcatttttcttg

SEQ ID NO: 500 - DNA, 29 bp, synthetic construct
  source 1..29: mol_type = other DNA
  misc_feature 9..10: note = DNA
  misc_feature order(1..8,11..29): note = RNA
  modified_base 8: mod_base = OTHER; note = 2-Prime-O-Methoxyethyl modified nucleoside
  modified_base 9: mod_base = OTHER; note = DNA nucleotide carrying a 6-amino-5-nitro-3-yl-2(1H)-pyridone nucleobase
  modified_base order(1,3,5,12,17): mod_base = OTHER; note = 2-Prime-Fluoro modified nucleoside
  modified_base order(2,4,6..7,11,13..16,18..29): mod_base = OTHER; note = 2-Prime-O-Methyl modified nucleoside
  modified_base order(1^2,28^29): mod_base = OTHER; note = (1,3-dimethylimidazolidin-2-ylidene) Phosphoramidate linkage
  modified_base order(2..10,11..28): mod_base = OTHER; note = Phosphorothioate linkage
  modified_base 10^11: mod_base = OTHER; note = Methylphosphonate linkage
  misc_feature 1..29: note = RM110292
tctgaggantgggttcatttttcttgtct

SEQ ID NO: 501 - DNA, 23 bp, synthetic construct
  source 1..23: mol_type = other DNA
  misc_feature 18..19: note = DNA
  misc_feature order(1..17,20..23): note = RNA
  modified_base 17: mod_base = OTHER; note = 2-Prime-O-Methoxyethyl modified nucleoside
  modified_base 18: mod_base = OTHER; note = DNA nucleotide carrying a 6-amino-5-nitro-3-yl-2(1H)-pyridone nucleobase
  modified_base order(12,21): mod_base = OTHER; note = 2-Prime-Fluoro modified nucleoside
  modified_base order(1..11,13..16,20,22..23): mod_base = OTHER; note = 2-Prime-O-Methyl modified nucleoside
  modified_base order(1^2,22^23): mod_base = OTHER; note = (1,3-dimethylimidazolidin-2-ylidene) Phosphoramidate linkage
  modified_base order(2..19,20..22): mod_base = OTHER; note = Phosphorothioate linkage
  modified_base 19^20: mod_base = OTHER; note = Methylphosphonate linkage
  misc_feature 1..23: note = RM110293
ggtcaaacctctgaggantgggt

SEQ ID NO: 502 - DNA, 23 bp, synthetic construct
  source 1..23: mol_type = other DNA
  misc_feature 15..16: note = DNA
  misc_feature order(1..14,17..23): note = RNA
  modified_base 14: mod_base = OTHER; note = 2-Prime-O-Methoxyethyl modified nucleoside
  modified_base 15: mod_base = OTHER; note = DNA nucleotide carrying a 6-amino-5-nitro-3-yl-2(1H)-pyridone nucleobase
  modified_base order(9,18): mod_base = OTHER; note = 2-Prime-Fluoro modified nucleoside
  modified_base order(1..8,10..13,17,19..23): mod_base = OTHER; note = 2-Prime-O-Methyl modified nucleoside
  modified_base order(1^2,22^23): mod_base = OTHER; note = (1,3-dimethylimidazolidin-2-ylidene) Phosphoramidate linkage
  modified_base order(2..16,17..22): mod_base = OTHER; note = Phosphorothioate linkage
  modified_base 16^17: mod_base = OTHER; note = Methylphosphonate linkage
  misc_feature 1..23: note = RM110294
caaacctctgaggantgggttca

SEQ ID NO: 503 - DNA, 23 bp, synthetic construct
  source 1..23: mol_type = other DNA
  misc_feature 12..13: note = DNA
  misc_feature order(1..11,14..23): note = RNA
  modified_base 11: mod_base = OTHER; note = 2-Prime-O-Methoxyethyl modified nucleoside
  modified_base 12: mod_base = OTHER; note = DNA nucleotide carrying a 6-amino-5-nitro-3-yl-2(1H)-pyridone nucleobase
  modified_base order(6,15): mod_base = OTHER; note = 2-Prime-Fluoro modified nucleoside
  modified_base order(1..5,7..10,14,16..23): mod_base = OTHER; note = 2-Prime-O-Methyl modified nucleoside
  modified_base order(1^2,22^23): mod_base = OTHER; note = (1,3-dimethylimidazolidin-2-ylidene) Phosphoramidate linkage
  modified_base order(2..13,14..22): mod_base = OTHER; note = Phosphorothioate linkage
  modified_base 13^14: mod_base = OTHER; note = Methylphosphonate linkage
  misc_feature 1..23: note = RM110295
acctctgaggantgggttcattt

SEQ ID NO: 504 - DNA, 23 bp, synthetic construct
  source 1..23: mol_type = other DNA
  misc_feature 9..10: note = DNA
  misc_feature order(1..8,11..23): note = RNA
  modified_base 8: mod_base = OTHER; note = 2-Prime-O-Methoxyethyl modified nucleoside
  modified_base 9: mod_base = OTHER; note = DNA nucleotide carrying a 6-amino-5-nitro-3-yl-2(1H)-pyridone nucleobase
  modified_base order(3,12): mod_base = OTHER; note = 2-Prime-Fluoro modified nucleoside
  modified_base order(1..2,4..7,11,13..23): mod_base = OTHER; note = 2-Prime-O-Methyl modified nucleoside
  modified_base order(1^2,22^23): mod_base = OTHER; note = (1,3-dimethylimidazolidin-2-ylidene) Phosphoramidate linkage
  modified_base order(2..10,11..22): mod_base = OTHER; note = Phosphorothioate linkage
  modified_base 10^11: mod_base = OTHER; note = Methylphosphonate linkage
  misc_feature 1..23: note = RM110296
tctgaggantgggttcatttttc

SEQ ID NO: 505 - DNA, 26 bp, synthetic construct
  source 1..26: mol_type = other DNA
  misc_feature 22..23: note = DNA
  misc_feature order(1..21,24..26): note = RNA
  modified_base 21: mod_base = OTHER; note = 2-Prime-O-Methoxyethyl modified nucleoside
  modified_base 22: mod_base = OTHER; note = DNA nucleotide carrying a 6-amino-5-nitro-3-yl-2(1H)-pyridone nucleobase
  modified_base order(16,25): mod_base = OTHER; note = 2-Prime-Fluoro modified nucleoside
  modified_base order(1..15,17..20,24,26): mod_base = OTHER; note = 2-Prime-O-Methyl modified nucleoside
  modified_base order(1^2,25^26): mod_base = OTHER; note = (1,3-dimethylimidazolidin-2-ylidene) Phosphoramidate linkage
  modified_base order(2..23,24^25): mod_base = OTHER; note = Phosphorothioate linkage
  modified_base 23^24: mod_base = OTHER; note = Methylphosphonate linkage
  misc_feature 1..26: note = RM110297
attcggtcaaacctctgaggantggg

SEQ ID NO: 506 - DNA, 26 bp, synthetic construct
  source 1..26: mol_type = other DNA
  misc_feature 19..20: note = DNA
  misc_feature order(1..18,21..26): note = RNA
  modified_base 18: mod_base = OTHER; note = 2-Prime-O-Methoxyethyl modified nucleoside
  modified_base 19: mod_base = OTHER; note = DNA nucleotide carrying a 6-amino-5-nitro-3-yl-2(1H)-pyridone nucleobase
  modified_base order(13,22): mod_base = OTHER; note = 2-Prime-Fluoro modified nucleoside
  modified_base order(1..12,14..17,21,23..26): mod_base = OTHER; note = 2-Prime-O-Methyl modified nucleoside
  modified_base order(1^2,25^26): mod_base = OTHER; note = (1,3-dimethylimidazolidin-2-ylidene) Phosphoramidate linkage
  modified_base order(2..20,21..25): mod_base = OTHER; note = Phosphorothioate linkage
  modified_base 20^21: mod_base = OTHER; note = Methylphosphonate linkage
  misc_feature 1..26: note = RM110298
cggtcaaacctctgaggantgggttc

SEQ ID NO: 507 - DNA, 26 bp, synthetic construct
  source 1..26: mol_type = other DNA
  misc_feature 16..17: note = DNA
  misc_feature order(1..15,18..26): note = RNA
  modified_base 15: mod_base = OTHER; note = 2-Prime-O-Methoxyethyl modified nucleoside
  modified_base 16: mod_base = OTHER; note = DNA nucleotide carrying a 6-amino-5-nitro-3-yl-2(1H)-pyridone nucleobase
  modified_base order(10,19): mod_base = OTHER; note = 2-Prime-Fluoro modified nucleoside
  modified_base order(1..9,11..14,18,20..26): mod_base = OTHER; note = 2-Prime-O-Methyl modified nucleoside
  modified_base order(1^2,25^26): mod_base = OTHER; note = (1,3-dimethylimidazolidin-2-ylidene) Phosphoramidate linkage
  modified_base order(2..17,18..25): mod_base = OTHER; note = Phosphorothioate linkage
  modified_base 17^18: mod_base = OTHER; note = Methylphosphonate linkage
  misc_feature 1..26: note = RM110299
tcaaacctctgaggantgggttcatt

SEQ ID NO: 508 - DNA, 26 bp, synthetic construct
  source 1..26: mol_type = other DNA
  misc_feature 13..14: note = DNA
  misc_feature order(1..12,15..26): note = RNA
  modified_base 12: mod_base = OTHER; note = 2-Prime-O-Methoxyethyl modified nucleoside
  modified_base 13: mod_base = OTHER; note = DNA nucleotide carrying a 6-amino-5-nitro-3-yl-2(1H)-pyridone nucleobase
  modified_base order(7,16): mod_base = OTHER; note = 2-Prime-Fluoro modified nucleoside
  modified_base order(1..6,8..11,15,17..26): mod_base = OTHER; note = 2-Prime-O-Methyl modified nucleoside
  modified_base order(1^2,25^26): mod_base = OTHER; note = (1,3-dimethylimidazolidin-2-ylidene) Phosphoramidate linkage
  modified_base order(2..14,15..25): mod_base = OTHER; note = Phosphorothioate linkage
  modified_base 14^15: mod_base = OTHER; note = Methylphosphonate linkage
  misc_feature 1..26: note = RM110300
aacctctgaggantgggttcattttt

SEQ ID NO: 509 - DNA, 26 bp, synthetic construct
  source 1..26: mol_type = other DNA
  misc_feature 10..11: note = DNA
  misc_feature order(1..9,12..26): note = RNA
  modified_base 9: mod_base = OTHER; note = 2-Prime-O-Methoxyethyl modified nucleoside
  modified_base 10: mod_base = OTHER; note = DNA nucleotide carrying a 6-amino-5-nitro-3-yl-2(1H)-pyridone nucleobase
  modified_base order(4,13): mod_base = OTHER; note = 2-Prime-Fluoro modified nucleoside
  modified_base order(1..3,5..8,12,14..26): mod_base = OTHER; note = 2-Prime-O-Methyl modified nucleoside
  modified_base order(1^2,25^26): mod_base = OTHER; note = (1,3-dimethylimidazolidin-2-ylidene) Phosphoramidate linkage
  modified_base order(2..11,12..25): mod_base = OTHER; note = Phosphorothioate linkage
  modified_base 11^12: mod_base = OTHER; note = Methylphosphonate linkage
  misc_feature 1..26: note = RM110301
ctctgaggantgggttcatttttctt

SEQ ID NO: 510 - DNA, 26 bp, synthetic construct
  source 1..26: mol_type = other DNA
  misc_feature 7..8: note = DNA
  misc_feature order(1..6,9..26): note = RNA
  modified_base 6: mod_base = OTHER; note = 2-Prime-O-Methoxyethyl modified nucleoside
  modified_base 7: mod_base = OTHER; note = DNA nucleotide carrying a 6-amino-5-nitro-3-yl-2(1H)-pyridone nucleobase
  modified_base order(1,10): mod_base = OTHER; note = 2-Prime-Fluoro modified nucleoside
  modified_base order(2..5,9,11..26): mod_base = OTHER; note = 2-Prime-O-Methyl modified nucleoside
  modified_base order(1^2,25^26): mod_base = OTHER; note = (1,3-dimethylimidazolidin-2-ylidene) Phosphoramidate linkage
  modified_base order(2..8,9..25): mod_base = OTHER; note = Phosphorothioate linkage
  modified_base 8^9: mod_base = OTHER; note = Methylphosphonate linkage
  misc_feature 1..26: note = RM110302
tgaggantgggttcatttttcttgtc

SEQ ID NO: 511 - DNA, 29 bp, synthetic construct
  source 1..29: mol_type = other DNA
  misc_feature 24..25: note = DNA
  misc_feature order(1..23,26..29): note = RNA
  modified_base 23: mod_base = OTHER; note = 2-Prime-O-Methoxyethyl modified nucleoside
  modified_base 24: mod_base = OTHER; note = DNA nucleotide carrying a 6-amino-5-nitro-3-yl-2(1H)-pyridone nucleobase
  modified_base order(18,27): mod_base = OTHER; note = 2-Prime-Fluoro modified nucleoside
  modified_base order(1..17,19..22,26,28..29): mod_base = OTHER; note = 2-Prime-O-Methyl modified nucleoside
  modified_base order(1^2,28^29): mod_base = OTHER; note = (1,3-dimethylimidazolidin-2-ylidene) Phosphoramidate linkage
  modified_base order(2..25,26..28): mod_base = OTHER; note = Phosphorothioate linkage
  modified_base 25^26: mod_base = OTHER; note = Methylphosphonate linkage
  misc_feature 1..29: note = RM110303
caattcggtcaaacctctgaggantgggt

SEQ ID NO: 512 - DNA, 29 bp, synthetic construct
  source 1..29: mol_type = other DNA
  misc_feature 21..22: note = DNA
  misc_feature order(1..20,23..29): note = RNA
  modified_base 20: mod_base = OTHER; note = 2-Prime-O-Methoxyethyl modified nucleoside
  modified_base 21: mod_base = OTHER; note = DNA nucleotide carrying a 6-amino-5-nitro-3-yl-2(1H)-pyridone nucleobase
  modified_base order(15,24): mod_base = OTHER; note = 2-Prime-Fluoro modified nucleoside
  modified_base order(1..14,16..19,23,25..29): mod_base = OTHER; note = 2-Prime-O-Methyl modified nucleoside
  modified_base order(1^2,28^29): mod_base = OTHER; note = (1,3-dimethylimidazolidin-2-ylidene) Phosphoramidate linkage
  modified_base order(2..22,23..28): mod_base = OTHER; note = Phosphorothioate linkage
  modified_base 22^23: mod_base = OTHER; note = Methylphosphonate linkage
  misc_feature 1..29: note = RM110304
ttcggtcaaacctctgaggantgggttca

SEQ ID NO: 513 - DNA, 29 bp, synthetic construct
  source 1..29: mol_type = other DNA
  misc_feature 18..19: note = DNA
  misc_feature order(1..17,20..29): note = RNA
  modified_base 17: mod_base = OTHER; note = 2-Prime-O-Methoxyethyl modified nucleoside
  modified_base 18: mod_base = OTHER; note = DNA nucleotide carrying a 6-amino-5-nitro-3-yl-2(1H)-pyridone nucleobase
  modified_base order(12,21): mod_base = OTHER; note = 2-Prime-Fluoro modified nucleoside
  modified_base order(1..11,13..16,20,22..29): mod_base = OTHER; note = 2-Prime-O-Methyl modified nucleoside
  modified_base order(1^2,28^29): mod_base = OTHER; note = (1,3-dimethylimidazolidin-2-ylidene) Phosphoramidate linkage
  modified_base order(2..19,20..28): mod_base = OTHER; note = Phosphorothioate linkage
  modified_base 19^20: mod_base = OTHER; note = Methylphosphonate linkage
  misc_feature 1..29: note = RM110305
ggtcaaacctctgaggantgggttcattt

SEQ ID NO: 514 - DNA, 29 bp, synthetic construct
  source 1..29: mol_type = other DNA
  misc_feature 15..16: note = DNA
  misc_feature order(1..14,17..29): note = RNA
  modified_base 14: mod_base = OTHER; note = 2-Prime-O-Methoxyethyl modified nucleoside
  modified_base 15: mod_base = OTHER; note = DNA nucleotide carrying a 6-amino-5-nitro-3-yl-2(1H)-pyridone nucleobase
  modified_base order(9,18): mod_base = OTHER; note = 2-Prime-Fluoro modified nucleoside
  modified_base order(1..8,10..13,17,19..29): mod_base = OTHER; note = 2-Prime-O-Methyl modified nucleoside
  modified_base order(1^2,28^29): mod_base = OTHER; note = (1,3-dimethylimidazolidin-2-ylidene) Phosphoramidate linkage
  modified_base order(2..16,17..28): mod_base = OTHER; note = Phosphorothioate linkage
  modified_base 16^17: mod_base = OTHER; note = Methylphosphonate linkage
  misc_feature 1..29: note = RM110306
caaacctctgaggantgggttcatttttc

SEQ ID NO: 515 - DNA, 29 bp, synthetic construct
  source 1..29: mol_type = other DNA
  misc_feature 12..13: note = DNA
  misc_feature order(1..11,14..29): note = RNA
  modified_base 11: mod_base = OTHER; note = 2-Prime-O-Methoxyethyl modified nucleoside
  modified_base 12: mod_base = OTHER; note = DNA nucleotide carrying a 6-amino-5-nitro-3-yl-2(1H)-pyridone nucleobase
  modified_base order(6,15): mod_base = OTHER; note = 2-Prime-Fluoro modified nucleoside
  modified_base order(1..5,7..10,14,16..29): mod_base = OTHER; note = 2-Prime-O-Methyl modified nucleoside
  modified_base order(1^2,28^29): mod_base = OTHER; note = (1,3-dimethylimidazolidin-2-ylidene) Phosphoramidate linkage
  modified_base order(2..13,14..28): mod_base = OTHER; note = Phosphorothioate linkage
  modified_base 13^14: mod_base = OTHER; note = Methylphosphonate linkage
  misc_feature 1..29: note = RM110307
acctctgaggantgggttcatttttcttg

SEQ ID NO: 516 - DNA, 29 bp, synthetic construct
  source 1..29: mol_type = other DNA
  misc_feature 9..10: note = DNA
  misc_feature order(1..8,11..29): note = RNA
  modified_base 8: mod_base = OTHER; note = 2-Prime-O-Methoxyethyl modified nucleoside
  modified_base 9: mod_base = OTHER; note = DNA nucleotide carrying a 6-amino-5-nitro-3-yl-2(1H)-pyridone nucleobase
  modified_base order(3,12): mod_base = OTHER; note = 2-Prime-Fluoro modified nucleoside
  modified_base order(1..2,4..7,11,13..29): mod_base = OTHER; note = 2-Prime-O-Methyl modified nucleoside
  modified_base order(1^2,28^29): mod_base = OTHER; note = (1,3-dimethylimidazolidin-2-ylidene) Phosphoramidate linkage
  modified_base order(2..10,11..28): mod_base = OTHER; note = Phosphorothioate linkage
  modified_base 10^11: mod_base = OTHER; note = Methylphosphonate linkage
  misc_feature 1..29: note = RM110308
tctgaggantgggttcatttttcttgtct

SEQ ID NO: 517 - DNA, 32 bp, synthetic construct; identical to SEQ ID NO: 134
  source 1..32: mol_type = other DNA
  misc_feature 7..8: note = DNA
  misc_feature order(1..6,9..32): note = RNA
  modified_base 6: mod_base = OTHER; note = 2-Prime-O-Methoxyethyl modified nucleoside
  modified_base 7: mod_base = OTHER; note = DNA nucleotide carrying a 6-amino-5-nitro-3-yl-2(1H)-pyridone nucleobase
  modified_base order(5,10..11,18,26,31): mod_base = OTHER; note = 2-Prime-Fluoro modified nucleoside
  modified_base order(1..4,9,12..17,19..25,27..30,32): mod_base = OTHER; note = 2-Prime-O-Methyl modified nucleoside
  modified_base order(1^2,31^32): mod_base = OTHER; note = (1,3-dimethylimidazolidin-2-ylidene) Phosphoramidate linkage
  modified_base order(2..8,9..31): mod_base = OTHER; note = Phosphorothioate linkage
  modified_base 8^9: mod_base = OTHER; note = Methylphosphonate linkage
  misc_feature 1..32: note = RM110309

SEQ ID NO: 518 - DNA, 32 bp, synthetic construct; identical to SEQ ID NO: 127
  source 1..32: mol_type = other DNA
  misc_feature 28..29: note = DNA
  misc_feature order(1..27,30..32): note = RNA
  modified_base 27: mod_base = OTHER; note = 2-Prime-O-Methoxyethyl modified nucleoside
  modified_base 28: mod_base = OTHER; note = DNA nucleotide carrying a 6-amino-5-nitro-3-yl-2(1H)-pyridone nucleobase
  modified_base order(6,11,19,26,31..32): mod_base = OTHER; note = 2-Prime-Fluoro modified nucleoside
  modified_base order(1..5,7..10,12..18,20..25,30): mod_base = OTHER; note = 2-Prime-O-Methyl modified nucleoside
  modified_base order(1^2,31^32): mod_base = OTHER; note = (1,3-dimethylimidazolidin-2-ylidene) Phosphoramidate linkage
  modified_base order(2..29,30^31): mod_base = OTHER; note = Phosphorothioate linkage
  modified_base 29^30: mod_base = OTHER; note = Methylphosphonate linkage
  misc_feature 1..32: note = RM110310

SEQ ID NO: 519 - DNA, 32 bp, synthetic construct; identical to SEQ ID NO: 128
  source 1..32: mol_type = other DNA
  misc_feature 25..26: note = DNA
  misc_feature order(1..24,27..32): note = RNA
  modified_base 24: mod_base = OTHER; note = 2-Prime-O-Methoxyethyl modified nucleoside
  modified_base 25: mod_base = OTHER; note = DNA nucleotide carrying a 6-amino-5-nitro-3-yl-2(1H)-pyridone nucleobase
  modified_base order(3,8,16,23,28..29): mod_base = OTHER; note = 2-Prime-Fluoro modified nucleoside
  modified_base order(1..2,4..7,9..15,17..22,27,30..32): mod_base = OTHER; note = 2-Prime-O-Methyl modified nucleoside
  modified_base order(1^2,31^32): mod_base = OTHER; note = (1,3-dimethylimidazolidin-2-ylidene) Phosphoramidate linkage
  modified_base order(2..26,27..31): mod_base = OTHER; note = Phosphorothioate linkage
  modified_base 26^27: mod_base = OTHER; note = Methylphosphonate linkage
  misc_feature 1..32: note = RM110311

SEQ ID NO: 520 - DNA, 23 bp, synthetic construct
  source 1..23: mol_type = other DNA
  misc_feature 12..13: note = DNA
  misc_feature order(1..11,14..23): note = RNA
  modified_base 11: mod_base = OTHER; note = 2-Prime-O-Methoxyethyl modified nucleoside
  modified_base 12: mod_base = OTHER; note = DNA nucleotide carrying a 6-amino-5-nitro-3-yl-2(1H)-pyridone nucleobase
  modified_base order(10,15..16,23): mod_base = OTHER; note = 2-Prime-Fluoro modified nucleoside
  modified_base order(1..9,14,17..22): mod_base = OTHER; note = 2-Prime-O-Methyl modified nucleoside
  modified_base order(1^2,22^23): mod_base = OTHER; note = (1,3-dimethylimidazolidin-2-ylidene) Phosphoramidate linkage
  modified_base order(2..13,14..22): mod_base = OTHER; note = Phosphorothioate linkage
  modified_base 13^14: mod_base = OTHER; note = Methylphosphonate linkage
  misc_feature 1..23: note = RM110312
acctctgaggantgggttcattt

SEQ ID NO: 521 - DNA, 23 bp, synthetic construct
  source 1..23: mol_type = other DNA
  misc_feature 9..10: note = DNA
  misc_feature order(1..8,11..23): note = RNA
  modified_base 8: mod_base = OTHER; note = 2-Prime-O-Methoxyethyl modified nucleoside
  modified_base 9: mod_base = OTHER; note = DNA nucleotide carrying a 6-amino-5-nitro-3-yl-2(1H)-pyridone nucleobase
  modified_base order(7,12..13,20): mod_base = OTHER; note = 2-Prime-Fluoro modified nucleoside
  modified_base order(1..6,11,14..19,21..23): mod_base = OTHER; note = 2-Prime-O-Methyl modified nucleoside
  modified_base order(1^2,22^23): mod_base = OTHER; note = (1,3-dimethylimidazolidin-2-ylidene) Phosphoramidate linkage
  modified_base order(2..10,11..22): mod_base = OTHER; note = Phosphorothioate linkage
  modified_base 10^11: mod_base = OTHER; note = Methylphosphonate linkage
  misc_feature 1..23: note = RM110313
tctgaggantgggttcatttttc

SEQ ID NO: 522 - DNA, 23 bp, synthetic construct
  source 1..23: mol_type = other DNA
  misc_feature 6..7: note = DNA
  misc_feature order(1..5,8..23): note = RNA
  modified_base 5: mod_base = OTHER; note = 2-Prime-O-Methoxyethyl modified nucleoside
  modified_base 6: mod_base = OTHER; note = DNA nucleotide carrying a 6-amino-5-nitro-3-yl-2(1H)-pyridone nucleobase
  modified_base order(4,9..10,17): mod_base = OTHER; note = 2-Prime-Fluoro modified nucleoside
  modified_base order(1..3,8,11..16,18..23): mod_base = OTHER; note = 2-Prime-O-Methyl modified nucleoside
  modified_base order(1^2,22^23): mod_base = OTHER; note = (1,3-dimethylimidazolidin-2-ylidene) Phosphoramidate linkage
  modified_base order(2..7,8..22): mod_base = OTHER; note = Phosphorothioate linkage
  modified_base 7^8: mod_base = OTHER; note = Methylphosphonate linkage
  misc_feature 1..23: note = RM110314
gaggantgggttcatttttcttg

SEQ ID NO: 523 - DNA, 23 bp, synthetic construct
  source 1..23: mol_type = other DNA
  misc_feature 18..19: note = DNA
  misc_feature order(1..17,20..23): note = RNA
  modified_base 17: mod_base = OTHER; note = 2-Prime-O-Methoxyethyl modified nucleoside
  modified_base 18: mod_base = OTHER; note = DNA nucleotide carrying a 6-amino-5-nitro-3-yl-2(1H)-pyridone nucleobase
  modified_base order(9,16,21..22): mod_base = OTHER; note = 2-Prime-Fluoro modified nucleoside
  modified_base order(1..8,10..15,20,23): mod_base = OTHER; note = 2-Prime-O-Methyl modified nucleoside
  modified_base order(1^2,22^23): mod_base = OTHER; note = (1,3-dimethylimidazolidin-2-ylidene) Phosphoramidate linkage
  modified_base order(2..19,20..22): mod_base = OTHER; note = Phosphorothioate linkage
  modified_base 19^20: mod_base = OTHER; note = Methylphosphonate linkage
  misc_feature 1..23: note = RM110315
ggtcaaacctctgaggantgggt

SEQ ID NO: 524 - DNA, 23 bp, synthetic construct
  source 1..23: mol_type = other DNA
  misc_feature 15..16: note = DNA
  misc_feature order(1..14,17..23): note = RNA
  modified_base 14: mod_base = OTHER; note = 2-Prime-O-Methoxyethyl modified nucleoside
  modified_base 15: mod_base = OTHER; note = DNA nucleotide carrying a 6-amino-5-nitro-3-yl-2(1H)-pyridone nucleobase
  modified_base order(6,13,18..19): mod_base = OTHER; note = 2-Prime-Fluoro modified nucleoside
  modified_base order(1..5,7..12,17,20..23): mod_base = OTHER; note = 2-Prime-O-Methyl modified nucleoside
  modified_base order(1^2,22^23): mod_base = OTHER; note = (1,3-dimethylimidazolidin-2-ylidene) Phosphoramidate linkage
  modified_base order(2..16,17..22): mod_base = OTHER; note = Phosphorothioate linkage
  modified_base 16^17: mod_base = OTHER; note = Methylphosphonate linkage
  misc_feature 1..23: note = RM110316
caaacctctgaggantgggttca

SEQ ID NO: 525 - DNA, 23 bp, synthetic construct
  source 1..23: mol_type = other DNA
  misc_feature 12..13: note = DNA
  misc_feature order(1..11,14..23): note = RNA
  modified_base 11: mod_base = OTHER; note = 2-Prime-O-Methoxyethyl modified nucleoside
  modified_base 12: mod_base = OTHER; note = DNA nucleotide carrying a 6-amino-5-nitro-3-yl-2(1H)-pyridone nucleobase
  modified_base order(3,10,15..16): mod_base = OTHER; note = 2-Prime-Fluoro modified nucleoside
  modified_base order(1..2,4..9,14,17..23): mod_base = OTHER; note = 2-Prime-O-Methyl modified nucleoside
  modified_base order(1^2,22^23): mod_base = OTHER; note = (1,3-dimethylimidazolidin-2-ylidene) Phosphoramidate linkage
  modified_base order(2..13,14..22): mod_base = OTHER; note = Phosphorothioate linkage
  modified_base 13^14: mod_base = OTHER; note = Methylphosphonate linkage
  misc_feature 1..23: note = RM110317
acctctgaggantgggttcattt

SEQ ID NO: 526 - DNA, 26 bp, synthetic construct
  source 1..26: mol_type = other DNA
  misc_feature 13..14: note = DNA
  misc_feature order(1..12,15..26): note = RNA
  modified_base 12: mod_base = OTHER; note = 2-Prime-O-Methoxyethyl modified nucleoside
  modified_base 13: mod_base = OTHER; note = DNA nucleotide carrying a 6-amino-5-nitro-3-yl-2(1H)-pyridone nucleobase
  modified_base order(9..10,16,18,23..24,26): mod_base = OTHER; note = 2-Prime-Fluoro modified nucleoside
  modified_base order(1..8,11,15,17,19..22,25): mod_base = OTHER; note = 2-Prime-O-Methyl modified nucleoside
  modified_base order(1^2,25^26): mod_base = OTHER; note = (1,3-dimethylimidazolidin-2-ylidene) Phosphoramidate linkage
  modified_base order(2..14,15..25): mod_base = OTHER; note = Phosphorothioate linkage
  modified_base 14^15: mod_base = OTHER; note = Methylphosphonate linkage
  misc_feature 1..26: note = RM110318
aacctctgaggantgggttcattttt

SEQ ID NO: 527 - DNA, 26 bp, synthetic construct
  source 1..26: mol_type = other DNA
  misc_feature 10..11: note = DNA
  misc_feature order(1..9,12..26): note = RNA
  modified_base 9: mod_base = OTHER; note = 2-Prime-O-Methoxyethyl modified nucleoside
  modified_base 10: mod_base = OTHER; note = DNA nucleotide carrying a 6-amino-5-nitro-3-yl-2(1H)-pyridone nucleobase
  modified_base order(6..7,13,15,20..21,23): mod_base = OTHER; note = 2-Prime-Fluoro modified nucleoside
  modified_base order(1..5,8,12,14,16..19,22,24..26): mod_base = OTHER; note = 2-Prime-O-Methyl modified nucleoside
  modified_base order(1^2,25^26): mod_base = OTHER; note = (1,3-dimethylimidazolidin-2-ylidene) Phosphoramidate linkage
  modified_base order(2..11,12..25): mod_base = OTHER; note = Phosphorothioate linkage
  modified_base 11^12: mod_base = OTHER; note = Methylphosphonate linkage
  misc_feature 1..26: note = RM110319
ctctgaggantgggttcatttttctt

SEQ ID NO: 528 - DNA, 26 bp, synthetic construct
  source 1..26: mol_type = other DNA
  misc_feature 7..8: note = DNA
  misc_feature order(1..6,9..26): note = RNA
  modified_base 6: mod_base = OTHER; note = 2-Prime-O-Methoxyethyl modified nucleoside
  modified_base 7: mod_base = OTHER; note = DNA nucleotide carrying a 6-amino-5-nitro-3-yl-2(1H)-pyridone nucleobase
  modified_base order(3..4,10,12,17..18,20): mod_base = OTHER; note = 2-Prime-Fluoro modified nucleoside
  modified_base order(1..2,5,9,11,13..16,19,21..26): mod_base = OTHER; note = 2-Prime-O-Methyl modified nucleoside
  modified_base order(1^2,25^26): mod_base = OTHER; note = (1,3-dimethylimidazolidin-2-ylidene) Phosphoramidate linkage
  modified_base order(2..8,9..25): mod_base = OTHER; note = Phosphorothioate linkage
  modified_base 8^9: mod_base = OTHER; note = Methylphosphonate linkage
  misc_feature 1..26: note = RM110320
tgaggantgggttcatttttcttgtc

SEQ ID NO: 529 - DNA, 26 bp, synthetic construct
  source 1..26: mol_type = other DNA
  misc_feature 19..20: note = DNA
  misc_feature order(1..18,21..26): note = RNA
  modified_base 18: mod_base = OTHER; note = 2-Prime-O-Methoxyethyl modified nucleoside
  modified_base 19: mod_base = OTHER; note = DNA nucleotide carrying a 6-amino-5-nitro-3-yl-2(1H)-pyridone nucleobase
  modified_base order(8,10..11,16,22,24..25): mod_base = OTHER; note = 2-Prime-Fluoro modified nucleoside
  modified_base order(1..7,9,12..15,17,21,23,26): mod_base = OTHER; note = 2-Prime-O-Methyl modified nucleoside
  modified_base order(1^2,25^26): mod_base = OTHER; note = (1,3-dimethylimidazolidin-2-ylidene) Phosphoramidate linkage
  modified_base order(2..20,21..25): mod_base = OTHER; note = Phosphorothioate linkage
  modified_base 20^21: mod_base = OTHER; note = Methylphosphonate linkage
  misc_feature 1..26: note = RM110321
cggtcaaacctctgaggantgggttc

SEQ ID NO: 530 - DNA, 26 bp, synthetic construct
  source 1..26: mol_type = other DNA
  misc_feature 16..17: note = DNA
  misc_feature order(1..15,18..26): note = RNA
  modified_base 15: mod_base = OTHER; note = 2-Prime-O-Methoxyethyl modified nucleoside
  modified_base 16: mod_base = OTHER; note = DNA nucleotide carrying a 6-amino-5-nitro-3-yl-2(1H)-pyridone nucleobase
  modified_base order(5,7..8,13,19,21..22): mod_base = OTHER; note = 2-Prime-Fluoro modified nucleoside
  modified_base order(1..4,6,9..12,14,18,20,23..26): mod_base = OTHER; note = 2-Prime-O-Methyl modified nucleoside
  modified_base order(1^2,25^26): mod_base = OTHER; note = (1,3-dimethylimidazolidin-2-ylidene) Phosphoramidate linkage
  modified_base order(2..17,18..25): mod_base = OTHER; note = Phosphorothioate linkage
  modified_base 17^18: mod_base = OTHER; note = Methylphosphonate linkage
  misc_feature 1..26: note = RM110322
tcaaacctctgaggantgggttcatt

SEQ ID NO: 531 - DNA, 26 bp, synthetic construct
  source 1..26: mol_type = other DNA
  misc_feature 13..14: note = DNA
  misc_feature order(1..12,15..26): note = RNA
  modified_base 12: mod_base = OTHER; note = 2-Prime-O-Methoxyethyl modified nucleoside
  modified_base 13: mod_base = OTHER; note = DNA nucleotide carrying a 6-amino-5-nitro-3-yl-2(1H)-pyridone nucleobase
  modified_base order(2,4..5,10,16,18..19): mod_base = OTHER; note = 2-Prime-Fluoro modified nucleoside
  modified_base order(1,3,6..9,11,15,17,20..26): mod_base = OTHER; note = 2-Prime-O-Methyl modified nucleoside
  modified_base order(1^2,25^26): mod_base = OTHER; note = (1,3-dimethylimidazolidin-2-ylidene) Phosphoramidate linkage
  modified_base order(2..14,15..25): mod_base = OTHER; note = Phosphorothioate linkage
  modified_base 14^15: mod_base = OTHER; note = Methylphosphonate linkage
  misc_feature 1..26: note = RM110323
aacctctgaggantgggttcattttt

SEQ ID NO: 532 - DNA, 26 bp, synthetic construct
  source 1..26: mol_type = other DNA
  misc_feature 16..17: note = DNA
  misc_feature order(1..15,18..26): note = RNA
  modified_base 15: mod_base = OTHER; note = 2-Prime-O-Methoxyethyl modified nucleoside
  modified_base 16: mod_base = OTHER; note = DNA nucleotide carrying a 6-amino-5-nitro-3-yl-2(1H)-pyridone nucleobase
  modified_base order(12..13,19,21,26): mod_base = OTHER; note = 2-Prime-Fluoro modified nucleoside
  modified_base order(1..11,14,18,20,22..25): mod_base = OTHER; note = 2-Prime-O-Methyl modified nucleoside
  modified_base order(1^2,25^26): mod_base = OTHER; note = (1,3-dimethylimidazolidin-2-ylidene) Phosphoramidate linkage
  modified_base order(2..17,18..25): mod_base = OTHER; note = Phosphorothioate linkage
  modified_base 17^18: mod_base = OTHER; note = Methylphosphonate linkage
  misc_feature 1..26: note = RM110324
tcaaacctctgaggantgggttcatt

SEQ ID NO: 533 - DNA, 26 bp, synthetic construct
  source 1..26: mol_type = other DNA
  misc_feature 13..14: note = DNA
  misc_feature order(1..12,15..26): note = RNA
  modified_base 12: mod_base = OTHER; note = 2-Prime-O-Methoxyethyl modified nucleoside
  modified_base 13: mod_base = OTHER; note = DNA nucleotide carrying a 6-amino-5-nitro-3-yl-2(1H)-pyridone nucleobase
  modified_base order(9..10,16,18,23): mod_base = OTHER; note = 2-Prime-Fluoro modified nucleoside
  modified_base order(1..8,11,15,17,19..22,24..26): mod_base = OTHER; note = 2-Prime-O-Methyl modified nucleoside
  modified_base order(1^2,25^26): mod_base = OTHER; note = (1,3-dimethylimidazolidin-2-ylidene) Phosphoramidate linkage
  modified_base order(2..14,15..25): mod_base = OTHER; note = Phosphorothioate linkage
  modified_base 14^15: mod_base = OTHER; note = Methylphosphonate linkage
  misc_feature 1..26: note = RM110325
aacctctgaggantgggttcattttt

SEQ ID NO: 534 - DNA, 26 bp, synthetic construct
  source 1..26: mol_type = other DNA
  misc_feature 10..11: note = DNA
  misc_feature order(1..9,12..26): note = RNA
  modified_base 9: mod_base = OTHER; note = 2-Prime-O-Methoxyethyl modified nucleoside
  modified_base 10: mod_base = OTHER; note = DNA nucleotide carrying a 6-amino-5-nitro-3-yl-2(1H)-pyridone nucleobase
  modified_base order(6..7,13,15,20): mod_base = OTHER; note = 2-Prime-Fluoro modified nucleoside
  modified_base order(1..5,8,12,14,16..19,21..26): mod_base = OTHER; note = 2-Prime-O-Methyl modified nucleoside
  modified_base order(1^2,25^26): mod_base = OTHER; note = (1,3-dimethylimidazolidin-2-ylidene) Phosphoramidate linkage
  modified_base order(2..11,12..25): mod_base = OTHER; note = Phosphorothioate linkage
  modified_base 11^12: mod_base = OTHER; note = Methylphosphonate linkage
  misc_feature 1..26: note = RM110326
ctctgaggantgggttcatttttctt

SEQ ID NO: 535 - DNA, 26 bp, synthetic construct
  source 1..26: mol_type = other DNA
  misc_feature 7..8: note = DNA
  misc_feature order(1..6,9..26): note = RNA
  modified_base 6: mod_base = OTHER; note = 2-Prime-O-Methoxyethyl modified nucleoside
  modified_base 7: mod_base = OTHER; note = DNA nucleotide carrying a 6-amino-5-nitro-3-yl-2(1H)-pyridone nucleobase
  modified_base order(3..4,10,12,17): mod_base = OTHER; note = 2-Prime-Fluoro modified nucleoside
  modified_base order(1..2,5,9,11,13..16,18..26): mod_base = OTHER; note = 2-Prime-O-Methyl modified nucleoside
  modified_base order(1^2,25^26): mod_base = OTHER; note = (1,3-dimethylimidazolidin-2-ylidene) Phosphoramidate linkage
  modified_base order(2..8,9..25): mod_base = OTHER; note = Phosphorothioate linkage
  modified_base 8^9: mod_base = OTHER; note = Methylphosphonate linkage
  misc_feature 1..26: note = RM110327
tgaggantgggttcatttttcttgtc

SEQ ID NO: 536 - DNA, 29 bp, synthetic construct
  source 1..29: mol_type = other DNA
  misc_feature 18..19: note = DNA
  misc_feature order(1..17,20..29): note = RNA
  modified_base 17: mod_base = OTHER; note = 2-Prime-O-Methoxyethyl modified nucleoside
  modified_base 18: mod_base = OTHER; note = DNA nucleotide carrying a 6-amino-5-nitro-3-yl-2(1H)-pyridone nucleobase
  modified_base order(14..15,21,23,28): mod_base = OTHER; note = 2-Prime-Fluoro modified nucleoside
  modified_base order(1..13,16,20,22,24..27,29): mod_base = OTHER; note = 2-Prime-O-Methyl modified nucleoside
  modified_base order(1^2,28^29): mod_base = OTHER; note = (1,3-dimethylimidazolidin-2-ylidene) Phosphoramidate linkage
  modified_base order(2..19,20..28): mod_base = OTHER; note = Phosphorothioate linkage
  modified_base 19^20: mod_base = OTHER; note = Methylphosphonate linkage
  misc_feature 1..29: note = RM110328
ggtcaaacctctgaggantgggttcattt

SEQ ID NO: 537 - DNA, 29 bp, synthetic construct
  source 1..29: mol_type = other DNA
  misc_feature 15..16: note = DNA
  misc_feature order(1..14,17..29): note = RNA
  modified_base 14: mod_base = OTHER; note = 2-Prime-O-Methoxyethyl modified nucleoside
  modified_base 15: mod_base = OTHER; note = DNA nucleotide carrying a 6-amino-5-nitro-3-yl-2(1H)-pyridone nucleobase
  modified_base order(11..12,18,20,25): mod_base = OTHER; note = 2-Prime-Fluoro modified nucleoside
  modified_base order(1..10,13,17,19,21..24,26..29): mod_base = OTHER; note = 2-Prime-O-Methyl modified nucleoside
  modified_base order(1^2,28^29): mod_base = OTHER; note = (1,3-dimethylimidazolidin-2-ylidene) Phosphoramidate linkage
  modified_base order(2..16,17..28): mod_base = OTHER; note = Phosphorothioate linkage
  modified_base 16^17: mod_base = OTHER; note = Methylphosphonate linkage
  misc_feature 1..29: note = RM110329
caaacctctgaggantgggttcatttttc

SEQ ID NO: 538 - DNA, 29 bp, synthetic construct
  source 1..29: mol_type = other DNA
  misc_feature 12..13: note = DNA
  misc_feature order(1..11,14..29): note = RNA
  modified_base 11: mod_base = OTHER; note = 2-Prime-O-Methoxyethyl modified nucleoside
  modified_base 12: mod_base = OTHER; note = DNA nucleotide carrying a 6-amino-5-nitro-3-yl-2(1H)-pyridone nucleobase
  modified_base order(8..9,15,17,22): mod_base = OTHER; note = 2-Prime-Fluoro modified nucleoside
  modified_base order(1..7,10,14,16,18..21,23..29): mod_base = OTHER; note = 2-Prime-O-Methyl modified nucleoside
  modified_base order(1^2,28^29): mod_base = OTHER; note = (1,3-dimethylimidazolidin-2-ylidene) Phosphoramidate linkage
  modified_base order(2..13,14..28): mod_base = OTHER; note = Phosphorothioate linkage
  modified_base 13^14: mod_base = OTHER; note = Methylphosphonate linkage
  misc_feature 1..29: note = RM110330
acctctgaggantgggttcatttttcttg

SEQ ID NO: 539 - DNA, 29 bp, synthetic construct
  source 1..29: mol_type = other DNA
  misc_feature 9..10: note = DNA
  misc_feature order(1..8,11..29): note = RNA
  modified_base 8: mod_base = OTHER; note = 2-Prime-O-Methoxyethyl modified nucleoside
  modified_base 9: mod_base = OTHER; note = DNA nucleotide carrying a 6-amino-5-nitro-3-yl-2(1H)-pyridone nucleobase
  modified_base order(5..6,12,14,19): mod_base = OTHER; note = 2-Prime-Fluoro modified nucleoside
  modified_base order(1..4,7,11,13,15..18,20..29): mod_base = OTHER; note = 2-Prime-O-Methyl modified nucleoside
  modified_base order(1^2,28^29): mod_base = OTHER; note = (1,3-dimethylimidazolidin-2-ylidene) Phosphoramidate linkage
  modified_base order(2..10,11..28): mod_base = OTHER; note = Phosphorothioate linkage
  modified_base 10^11: mod_base = OTHER; note = Methylphosphonate linkage
  misc_feature 1..29: note = RM110331
tctgaggantgggttcatttttcttgtct

SEQ ID NO: 540 - DNA, 29 bp, synthetic construct
  source 1..29: mol_type = other DNA
  misc_feature 6..7: note = DNA
  misc_feature order(1..5,8..29): note = RNA
  modified_base 5: mod_base = OTHER; note = 2-Prime-O-Methoxyethyl modified nucleoside
  modified_base 6: mod_base = OTHER; note = DNA nucleotide carrying a 6-amino-5-nitro-3-yl-2(1H)-pyridone nucleobase
  modified_base order(2..3,9,11,16): mod_base = OTHER; note = 2-Prime-Fluoro modified nucleoside
  modified_base order(1,4,8,10,12..15,17..29): mod_base = OTHER; note = 2-Prime-O-Methyl modified nucleoside
  modified_base order(1^2,28^29): mod_base = OTHER; note = (1,3-dimethylimidazolidin-2-ylidene) Phosphoramidate linkage
  modified_base order(2..7,8..28): mod_base = OTHER; note = Phosphorothioate linkage
  modified_base 7^8: mod_base = OTHER; note = Methylphosphonate linkage
  misc_feature 1..29: note = RM110332
gaggantgggttcatttttcttgtctctt

SEQ ID NO: 541 - DNA, 26 bp, synthetic construct
  source 1..26: mol_type = other DNA
  misc_feature 19..20: note = DNA
  misc_feature order(1..18,21..26): note = RNA
  modified_base 18: mod_base = OTHER; note = 2-Prime-O-Methoxyethyl modified nucleoside
  modified_base 19: mod_base = OTHER; note = DNA nucleotide carrying a 6-amino-5-nitro-3-yl-2(1H)-pyridone nucleobase
  modified_base order(11,16,22,24..25): mod_base = OTHER; note = 2-Prime-Fluoro modified nucleoside
  modified_base order(1..10,12..15,17,21,23,26): mod_base = OTHER; note = 2-Prime-O-Methyl modified nucleoside
  modified_base order(1^2,25^26): mod_base = OTHER; note = (1,3-dimethylimidazolidin-2-ylidene) Phosphoramidate linkage
  modified_base order(2..20,21..25): mod_base = OTHER; note = Phosphorothioate linkage
  modified_base 20^21: mod_base = OTHER; note = Methylphosphonate linkage
  misc_feature 1..26: note = RM110333
cggtcaaacctctgaggantgggttc

SEQ ID NO: 542 - DNA, 26 bp, synthetic construct
  source 1..26: mol_type = other DNA
  misc_feature 16..17: note = DNA
  misc_feature order(1..15,18..26): note = RNA
  modified_base 15: mod_base = OTHER; note = 2-Prime-O-Methoxyethyl modified nucleoside
  modified_base 16: mod_base = OTHER; note = DNA nucleotide carrying a 6-amino-5-nitro-3-yl-2(1H)-pyridone nucleobase
  modified_base order(8,13,19,21..22): mod_base = OTHER; note = 2-Prime-Fluoro modified nucleoside
  modified_base order(1..7,9..12,14,18,20,23..26): mod_base = OTHER; note = 2-Prime-O-Methyl modified nucleoside
  modified_base order(1^2,25^26): mod_base = OTHER; note = (1,3-dimethylimidazolidin-2-ylidene) Phosphoramidate linkage
  modified_base order(2..17,18..25): mod_base = OTHER; note = Phosphorothioate linkage
  modified_base 17^18: mod_base = OTHER; note = Methylphosphonate linkage
  misc_feature 1..26: note = RM110334
tcaaacctctgaggantgggttcatt

SEQ ID NO: 543 - DNA, 26 bp, synthetic construct
  source 1..26: mol_type = other DNA
  misc_feature 13..14: note = DNA
  misc_feature order(1..12,15..26): note = RNA
  modified_base 12: mod_base = OTHER; note = 2-Prime-O-Methoxyethyl modified nucleoside
  modified_base 13: mod_base = OTHER; note = DNA nucleotide carrying a 6-amino-5-nitro-3-yl-2(1H)-pyridone nucleobase
  modified_base order(5,10,16,18..19): mod_base = OTHER; note = 2-Prime-Fluoro modified nucleoside
  modified_base order(1..4,6..9,11,15,17,20..26): mod_base = OTHER; note = 2-Prime-O-Methyl modified nucleoside
  modified_base order(1^2,25^26): mod_base = OTHER; note = (1,3-dimethylimidazolidin-2-ylidene) Phosphoramidate linkage
  modified_base order(2..14,15..25): mod_base = OTHER; note = Phosphorothioate linkage
  modified_base 14^15: mod_base = OTHER; note = Methylphosphonate linkage
  misc_feature 1..26: note = RM110335
aacctctgaggantgggttcattttt

SEQ ID NO: 544 - DNA, 26 bp, synthetic construct
  source 1..26: mol_type = other DNA
  misc_feature 10..11: note = DNA
  misc_feature order(1..9,12..26): note = RNA
  modified_base 9: mod_base = OTHER; note = 2-Prime-O-Methoxyethyl modified nucleoside
  modified_base 10: mod_base = OTHER; note = DNA nucleotide carrying a 6-amino-5-nitro-3-yl-2(1H)-pyridone nucleobase
  modified_base order(2,7,13,15..16): mod_base = OTHER; note = 2-Prime-Fluoro modified nucleoside
  modified_base order(1,3..6,8,12,14,17..26): mod_base = OTHER; note = 2-Prime-O-Methyl modified nucleoside
  modified_base order(1^2,25^26): mod_base = OTHER; note = (1,3-dimethylimidazolidin-2-ylidene) Phosphoramidate linkage
  modified_base order(2..11,12..25): mod_base = OTHER; note = Phosphorothioate linkage
  modified_base 11^12: mod_base = OTHER; note = Methylphosphonate linkage
  misc_feature 1..26: note = RM110336
ctctgaggantgggttcatttttctt

SEQ ID NO: 545 - DNA, 29 bp, synthetic construct
  source 1..29: mol_type = other DNA
  misc_feature 21..22: note = DNA
  misc_feature order(1..20,23..29): note = RNA
  modified_base 20: mod_base = OTHER; note = 2-Prime-O-Methoxyethyl modified nucleoside
  modified_base 21: mod_base = OTHER; note = DNA nucleotide carrying a 6-amino-5-nitro-3-yl-2(1H)-pyridone nucleobase
  modified_base order(13,18,24,26..27): mod_base = OTHER; note = 2-Prime-Fluoro modified nucleoside
  modified_base order(1..12,14..17,19,23,25,28..29): mod_base = OTHER; note = 2-Prime-O-Methyl modified nucleoside
  modified_base order(1^2,28^29): mod_base = OTHER; note = (1,3-dimethylimidazolidin-2-ylidene) Phosphoramidate linkage
  modified_base order(2..22,23..28): mod_base = OTHER; note = Phosphorothioate linkage
  modified_base 22^23: mod_base = OTHER; note = Methylphosphonate linkage
  misc_feature 1..29: note = RM110337
ttcggtcaaacctctgaggantgggttca

SEQ ID NO: 546 - DNA, 29 bp, synthetic construct
  source 1..29: mol_type = other DNA
  misc_feature 18..19: note = DNA
  misc_feature order(1..17,20..29): note = RNA
  modified_base 17: mod_base = OTHER; note = 2-Prime-O-Methoxyethyl modified nucleoside
  modified_base 18: mod_base = OTHER; note = DNA nucleotide carrying a 6-amino-5-nitro-3-yl-2(1H)-pyridone nucleobase
  modified_base order(10,15,21,23..24): mod_base = OTHER; note = 2-Prime-Fluoro modified nucleoside
  modified_base order(1..9,11..14,16,20,22,25..29): mod_base = OTHER; note = 2-Prime-O-Methyl modified nucleoside
  modified_base order(1^2,28^29): mod_base = OTHER; note = (1,3-dimethylimidazolidin-2-ylidene) Phosphoramidate linkage
  modified_base order(2..19,20..28): mod_base = OTHER; note = Phosphorothioate linkage
  modified_base 19^20: mod_base = OTHER; note = Methylphosphonate linkage
  misc_feature 1..29: note = RM110338
ggtcaaacctctgaggantgggttcattt

SEQ ID NO: 547 - DNA, 29 bp, synthetic construct
  source 1..29: mol_type = other DNA
  misc_feature 15..16: note = DNA
  misc_feature order(1..14,17..29): note = RNA
  modified_base 14: mod_base = OTHER; note = 2-Prime-O-Methoxyethyl modified nucleoside
  modified_base 15: mod_base = OTHER; note = DNA nucleotide carrying a 6-amino-5-nitro-3-yl-2(1H)-pyridone nucleobase
  modified_base order(7,12,18,20..21): mod_base = OTHER; note = 2-Prime-Fluoro modified nucleoside
  modified_base order(1..6,8..11,13,17,19,22..29): mod_base = OTHER; note = 2-Prime-O-Methyl modified nucleoside
  modified_base order(1^2,28^29): mod_base = OTHER; note = (1,3-dimethylimidazolidin-2-ylidene) Phosphoramidate linkage
  modified_base order(2..16,17..28): mod_base = OTHER; note = Phosphorothioate linkage
  modified_base 16^17: mod_base = OTHER; note = Methylphosphonate linkage
  misc_feature 1..29: note = RM110339
caaacctctgaggantgggttcatttttc

SEQ ID NO: 548 - DNA, 29 bp, synthetic construct
  source 1..29: mol_type = other DNA
  misc_feature 12..13: note = DNA
  misc_feature order(1..11,14..29): note = RNA
  modified_base 11: mod_base = OTHER; note = 2-Prime-O-Methoxyethyl modified nucleoside
  modified_base 12: mod_base = OTHER; note = DNA nucleotide carrying a 6-amino-5-nitro-3-yl-2(1H)-pyridone nucleobase
  modified_base order(4,9,15,17..18): mod_base = OTHER; note = 2-Prime-Fluoro modified nucleoside
  modified_base order(1..3,5..8,10,14,16,19..29): mod_base = OTHER; note = 2-Prime-O-Methyl modified nucleoside
  modified_base order(1^2,28^29): mod_base = OTHER; note = (1,3-dimethylimidazolidin-2-ylidene) Phosphoramidate linkage
  modified_base order(2..13,14..28): mod_base = OTHER; note = Phosphorothioate linkage
  modified_base 13^14: mod_base = OTHER; note = Methylphosphonate linkage
  misc_feature 1..29: note = RM110340
acctctgaggantgggttcatttttcttg

SEQ ID NO: 549 - DNA, 29 bp, synthetic construct
  source 1..29: mol_type = other DNA
  misc_feature 9..10: note = DNA
  misc_feature order(1..8,11..29): note = RNA
  modified_base 8: mod_base = OTHER; note = 2-Prime-O-Methoxyethyl modified nucleoside
  modified_base 9: mod_base = OTHER; note = DNA nucleotide carrying a 6-amino-5-nitro-3-yl-2(1H)-pyridone nucleobase
  modified_base order(1,6,12,14..15): mod_base = OTHER; note = 2-Prime-Fluoro modified nucleoside
  modified_base order(2..5,7,11,13,16..29): mod_base = OTHER; note = 2-Prime-O-Methyl modified nucleoside
  modified_base order(1^2,28^29): mod_base = OTHER; note = (1,3-dimethylimidazolidin-2-ylidene) Phosphoramidate linkage
  modified_base order(2..10,11..28): mod_base = OTHER; note = Phosphorothioate linkage
  modified_base 10^11: mod_base = OTHER; note = Methylphosphonate linkage
  misc_feature 1..29: note = RM110341
tctgaggantgggttcatttttcttgtct

SEQ ID NO: 550 - DNA, 32 bp, synthetic construct; identical to SEQ ID NO: 129
  source 1..32: mol_type = other DNA
  misc_feature 22..23: note = DNA
  misc_feature order(1..21,24..32): note = RNA
  modified_base 21: mod_base = OTHER; note = 2-Prime-O-Methoxyethyl modified nucleoside
  modified_base 22: mod_base = OTHER; note = DNA nucleotide carrying a 6-amino-5-nitro-3-yl-2(1H)-pyridone nucleobase
  modified_base order(8,13,16,18..19,25..26,31..32): mod_base = OTHER; note = 2-Prime-Fluoro modified nucleoside
  modified_base order(1..7,9..12,14..15,17,20,24,27..30): mod_base = OTHER; note = 2-Prime-O-Methyl modified nucleoside
  modified_base order(1^2,31^32): mod_base = OTHER; note = (1,3-dimethylimidazolidin-2-ylidene) Phosphoramidate linkage
  modified_base order(2..23,24..31): mod_base = OTHER; note = Phosphorothioate linkage
  modified_base 23^24: mod_base = OTHER; note = Methylphosphonate linkage
  misc_feature 1..32: note = RM110342

SEQ ID NO: 551 - DNA, 32 bp, synthetic construct; identical to SEQ ID NO: 19
  source 1..32: mol_type = other DNA
  misc_feature 19..20: note = DNA
  misc_feature order(1..18,21..32): note = RNA
  modified_base 18: mod_base = OTHER; note = 2-Prime-O-Methoxyethyl modified nucleoside
  modified_base 19: mod_base = OTHER; note = DNA nucleotide carrying a 6-amino-5-nitro-3-yl-2(1H)-pyridone nucleobase
  modified_base order(5,10,13,15..16,22..23,28..29): mod_base = OTHER; note = 2-Prime-Fluoro modified nucleoside
  modified_base order(1..4,6..9,11..12,14,17,21,24..27,30..32): mod_base = OTHER; note = 2-Prime-O-Methyl modified nucleoside
  modified_base order(1^2,31^32): mod_base = OTHER; note = (1,3-dimethylimidazolidin-2-ylidene) Phosphoramidate linkage
  modified_base order(2..20,21..31): mod_base = OTHER; note = Phosphorothioate linkage
  modified_base 20^21: mod_base = OTHER; note = Methylphosphonate linkage
  misc_feature 1..32: note = RM110343

SEQ ID NO: 552 - DNA, 32 bp, synthetic construct; identical to SEQ ID NO: 131
  source 1..32: mol_type = other DNA
  misc_feature 16..17: note = DNA
  misc_feature order(1..15,18..32): note = RNA
  modified_base 15: mod_base = OTHER; note = 2-Prime-O-Methoxyethyl modified nucleoside
  modified_base 16: mod_base = OTHER; note = DNA nucleotide carrying a 6-amino-5-nitro-3-yl-2(1H)-pyridone nucleobase
  modified_base order(2,7,10,12..13,19..20,25..26): mod_base = OTHER; note = 2-Prime-Fluoro modified nucleoside
  modified_base order(1,3..6,8..9,11,14,18,21..24,27..32): mod_base = OTHER; note = 2-Prime-O-Methyl modified nucleoside
  modified_base order(1^2,31^32): mod_base = OTHER; note = (1,3-dimethylimidazolidin-2-ylidene) Phosphoramidate linkage
  modified_base order(2..17,18..31): mod_base = OTHER; note = Phosphorothioate linkage
  modified_base 17^18: mod_base = OTHER; note = Methylphosphonate linkage
  misc_feature 1..32: note = RM110344

SEQ ID NO: 553 - DNA, 32 bp, synthetic construct; identical to SEQ ID NO: 131
  source 1..32: mol_type = other DNA
  misc_feature 16..17: note = DNA
  misc_feature order(1..15,18..32): note = RNA
  modified_base 15: mod_base = OTHER; note = 2-Prime-O-Methoxyethyl modified nucleoside
  modified_base 16: mod_base = OTHER; note = DNA nucleotide carrying a 6-amino-5-nitro-3-yl-2(1H)-pyridone nucleobase
  modified_base order(8..9,14,19,21..22,24,27,32): mod_base = OTHER; note = 2-Prime-Fluoro modified nucleoside
  modified_base order(1..7,10..13,18,20,23,25..26,28..31): mod_base = OTHER; note = 2-Prime-O-Methyl modified nucleoside
  modified_base order(1^2,31^32): mod_base = OTHER; note = (1,3-dimethylimidazolidin-2-ylidene) Phosphoramidate linkage
  modified_base order(2..17,18..31): mod_base = OTHER; note = Phosphorothioate linkage
  modified_base 17^18: mod_base = OTHER; note = Methylphosphonate linkage
  misc_feature 1..32: note = RM110345

SEQ ID NO: 554 - DNA, 32 bp, synthetic construct; identical to SEQ ID NO: 132
  source 1..32: mol_type = other DNA
  misc_feature 13..14: note = DNA
  misc_feature order(1..12,15..32): note = RNA
  modified_base 12: mod_base = OTHER; note = 2-Prime-O-Methoxyethyl modified nucleoside
  modified_base 13: mod_base = OTHER; note = DNA nucleotide carrying a 6-amino-5-nitro-3-yl-2(1H)-pyridone nucleobase
  modified_base order(5..6,11,16,18..19,21,24,29): mod_base = OTHER; note = 2-Prime-Fluoro modified nucleoside
  modified_base order(1..4,7..10,15,17,20,22..23,25..28,30..32): mod_base = OTHER; note = 2-Prime-O-Methyl modified nucleoside
  modified_base order(1^2,31^32): mod_base = OTHER; note = (1,3-dimethylimidazolidin-2-ylidene) Phosphoramidate linkage
  modified_base order(2..14,15..31): mod_base = OTHER; note = Phosphorothioate linkage
  modified_base 14^15: mod_base = OTHER; note = Methylphosphonate linkage
  misc_feature 1..32: note = RM110346

SEQ ID NO: 555 - DNA, 32 bp, synthetic construct; identical to SEQ ID NO: 133
  source 1..32: mol_type = other DNA
  misc_feature 10..11: note = DNA
  misc_feature order(1..9,12..32): note = RNA
  modified_base 9: mod_base = OTHER; note = 2-Prime-O-Methoxyethyl modified nucleoside
  modified_base 10: mod_base = OTHER; note = DNA nucleotide carrying a 6-amino-5-nitro-3-yl-2(1H)-pyridone nucleobase
  modified_base order(2..3,8,13,15..16,18,21,26): mod_base = OTHER; note = 2-Prime-Fluoro modified nucleoside
  modified_base order(1,4..7,12,14,17,19..20,22..25,27..32): mod_base = OTHER; note = 2-Prime-O-Methyl modified nucleoside
  modified_base order(1^2,31^32): mod_base = OTHER; note = (1,3-dimethylimidazolidin-2-ylidene) Phosphoramidate linkage
  modified_base order(2..11,12..31): mod_base = OTHER; note = Phosphorothioate linkage
  modified_base 11^12: mod_base = OTHER; note = Methylphosphonate linkage
  misc_feature 1..32: note = RM110347

SEQ ID NO: 556 - DNA, 23 bp, synthetic construct
  source 1..23: mol_type = other DNA
  misc_feature 18..19: note = DNA
  misc_feature order(1..17,20..23): note = RNA
  modified_base 17: mod_base = OTHER; note = 2-Prime-O-Methoxyethyl modified nucleoside
  modified_base 18: mod_base = OTHER; note = DNA nucleotide carrying a 6-amino-5-nitro-3-yl-2(1H)-pyridone nucleobase
  modified_base order(9,12,14..15,21..22): mod_base = OTHER; note = 2-Prime-Fluoro modified nucleoside
  modified_base order(1..8,10..11,13,16,20,23): mod_base = OTHER; note = 2-Prime-O-Methyl modified nucleoside
  modified_base order(1^2,22^23): mod_base = OTHER; note = (1,3-dimethylimidazolidin-2-ylidene) Phosphoramidate linkage
  modified_base order(2..19,20..22): mod_base = OTHER; note = Phosphorothioate linkage
  modified_base 19^20: mod_base = OTHER; note = Methylphosphonate linkage
  misc_feature 1..23: note = RM110348
ggtcaaacctctgaggantgggt

SEQ ID NO: 557 - DNA, 23 bp, synthetic construct
  source 1..23: mol_type = other DNA
  misc_feature 15..16: note = DNA
  misc_feature order(1..14,17..23): note = RNA
  modified_base 14: mod_base = OTHER; note = 2-Prime-O-Methoxyethyl modified nucleoside
  modified_base 15: mod_base = OTHER; note = DNA nucleotide carrying a 6-amino-5-nitro-3-yl-2(1H)-pyridone nucleobase
  modified_base order(6,9,11..12,18..19): mod_base = OTHER; note = 2-Prime-Fluoro modified nucleoside
  modified_base order(1..5,7..8,10,13,17,20..23): mod_base = OTHER; note = 2-Prime-O-Methyl modified nucleoside
  modified_base order(1^2,22^23): mod_base = OTHER; note = (1,3-dimethylimidazolidin-2-ylidene) Phosphoramidate linkage
  modified_base order(2..16,17..22): mod_base = OTHER; note = Phosphorothioate linkage
  modified_base 16^17: mod_base = OTHER; note = Methylphosphonate linkage
  misc_feature 1..23: note = RM110349
caaacctctgaggantgggttca

SEQ ID NO: 558 - DNA, 23 bp, synthetic construct
  source 1..23: mol_type = other DNA
  misc_feature 12..13: note = DNA
  misc_feature order(1..11,14..23): note = RNA
  modified_base 11: mod_base = OTHER; note = 2-Prime-O-Methoxyethyl modified nucleoside
  modified_base 12: mod_base = OTHER; note = DNA nucleotide carrying a 6-amino-5-nitro-3-yl-2(1H)-pyridone nucleobase
  modified_base order(3,6,8..9,15..16): mod_base = OTHER; note = 2-Prime-Fluoro modified nucleoside
  modified_base order(1..2,4..5,7,10,14,17..23): mod_base = OTHER; note = 2-Prime-O-Methyl modified nucleoside
  modified_base order(1^2,22^23): mod_base = OTHER; note = (1,3-dimethylimidazolidin-2-ylidene) Phosphoramidate linkage
  modified_base order(2..13,14..22): mod_base = OTHER; note = Phosphorothioate linkage
  modified_base 13^14: mod_base = OTHER; note = Methylphosphonate linkage
  misc_feature 1..23: note = RM110350
acctctgaggantgggttcattt

SEQ ID NO: 559 - DNA, 32 bp, synthetic construct; identical to SEQ ID NO: 127
  source 1..32: mol_type = other DNA
  misc_feature 28..29: note = DNA
  misc_feature order(1..27,30..32): note = RNA
  modified_base 27: mod_base = OTHER; note = 2-Prime-O-Methoxyethyl modified nucleoside
  modified_base 28: mod_base = OTHER; note = DNA nucleotide carrying a 6-amino-5-nitro-3-yl-2(1H)-pyridone nucleobase
  modified_base order(19,22,24..25,31..32): mod_base = OTHER; note = 2-Prime-Fluoro modified nucleoside
  modified_base order(1..18,20..21,23,26,30): mod_base = OTHER; note = 2-Prime-O-Methyl modified nucleoside
  modified_base order(1^2,31^32): mod_base = OTHER; note = (1,3-dimethylimidazolidin-2-ylidene) Phosphoramidate linkage
  modified_base order(2..29,30^31): mod_base = OTHER; note = Phosphorothioate linkage
  modified_base 29^30: mod_base = OTHER; note = Methylphosphonate linkage
  misc_feature 1..32: note = RM110351

SEQ ID NO: 560 - DNA, 32 bp, synthetic construct; identical to SEQ ID NO: 128
  source 1..32: mol_type = other DNA
  misc_feature 25..26: note = DNA
  misc_feature order(1..24,27..32): note = RNA
  modified_base 24: mod_base = OTHER; note = 2-Prime-O-Methoxyethyl modified nucleoside
  modified_base 25: mod_base = OTHER; note = DNA nucleotide carrying a 6-amino-5-nitro-3-yl-2(1H)-pyridone nucleobase
  modified_base order(16,19,21..22,28..29): mod_base = OTHER; note = 2-Prime-Fluoro modified nucleoside
  modified_base order(1..15,17..18,20,23,27,30..32): mod_base = OTHER; note = 2-Prime-O-Methyl modified nucleoside
  modified_base order(1^2,31^32): mod_base = OTHER; note = (1,3-dimethylimidazolidin-2-ylidene) Phosphoramidate linkage
  modified_base order(2..26,27..31): mod_base = OTHER; note = Phosphorothioate linkage
  modified_base 26^27: mod_base = OTHER; note = Methylphosphonate linkage
  misc_feature 1..32: note = RM110352

SEQ ID NO: 561 - DNA, 32 bp, synthetic construct; identical to SEQ ID NO: 129
  source 1..32: mol_type = other DNA
  misc_feature 22..23: note = DNA
  misc_feature order(1..21,24..32): note = RNA
  modified_base 21: mod_base = OTHER; note = 2-Prime-O-Methoxyethyl modified nucleoside
  modified_base 22: mod_base = OTHER; note = DNA nucleotide carrying a 6-amino-5-nitro-3-yl-2(1H)-pyridone nucleobase
  modified_base order(13,16,18..19,25..26): mod_base = OTHER; note = 2-Prime-Fluoro modified nucleoside
  modified_base order(1..12,14..15,17,20,24,27..32): mod_base = OTHER; note = 2-Prime-O-Methyl modified nucleoside
  modified_base order(1^2,31^32): mod_base = OTHER; note = (1,3-dimethylimidazolidin-2-ylidene) Phosphoramidate linkage
  modified_base order(2..23,24..31): mod_base = OTHER; note = Phosphorothioate linkage
  modified_base 23^24: mod_base = OTHER; note = Methylphosphonate linkage
  misc_feature 1..32: note = RM110353

SEQ ID NO: 562 - DNA, 32 bp, synthetic construct; identical to SEQ ID NO: 19
  source 1..32: mol_type = other DNA
  misc_feature 19..20: note = DNA
  misc_feature order(1..18,21..32): note = RNA
  modified_base 18: mod_base = OTHER; note = 2-Prime-O-Methoxyethyl modified nucleoside
  modified_base 19: mod_base = OTHER; note = DNA nucleotide carrying a 6-amino-5-nitro-3-yl-2(1H)-pyridone nucleobase
  modified_base order(10,13,15..16,22..23): mod_base = OTHER; note = 2-Prime-Fluoro modified nucleoside
  modified_base order(1..9,11..12,14,17,21,24..32): mod_base = OTHER; note = 2-Prime-O-Methyl modified nucleoside
  modified_base order(1^2,31^32): mod_base = OTHER; note = (1,3-dimethylimidazolidin-2-ylidene) Phosphoramidate linkage
  modified_base order(2..20,21..31): mod_base = OTHER; note = Phosphorothioate linkage
  modified_base 20^21: mod_base = OTHER; note = Methylphosphonate linkage
  misc_feature 1..32: note = RM110354

SEQ ID NO: 563 - DNA, 32 bp, synthetic construct; identical to SEQ ID NO: 131
  source 1..32: mol_type = other DNA
  misc_feature 16..17: note = DNA
  misc_feature order(1..15,18..32): note = RNA
  modified_base 15: mod_base = OTHER; note = 2-Prime-O-Methoxyethyl modified nucleoside
  modified_base 16: mod_base = OTHER; note = DNA nucleotide carrying a 6-amino-5-nitro-3-yl-2(1H)-pyridone nucleobase
  modified_base order(7,10,12..13,19..20): mod_base = OTHER; note = 2-Prime-Fluoro modified nucleoside
  modified_base order(1..6,8..9,11,14,18,21..32): mod_base = OTHER; note = 2-Prime-O-Methyl modified nucleoside
  modified_base order(1^2,31^32): mod_base = OTHER; note = (1,3-dimethylimidazolidin-2-ylidene) Phosphoramidate linkage
  modified_base order(2..17,18..31): mod_base = OTHER; note = Phosphorothioate linkage
  modified_base 17^18: mod_base = OTHER; note = Methylphosphonate linkage
  misc_feature 1..32: note = RM110355

SEQ ID NO: 564 - DNA, 32 bp, synthetic construct; identical to SEQ ID NO: 132
  source 1..32: mol_type = other DNA
  misc_feature 13..14: note = DNA
  misc_feature order(1..12,15..32): note = RNA
  modified_base 12: mod_base = OTHER; note = 2-Prime-O-Methoxyethyl modified nucleoside
  modified_base 13: mod_base = OTHER; note = DNA nucleotide carrying a 6-amino-5-nitro-3-yl-2(1H)-pyridone nucleobase
  modified_base order(4,7,9..10,16..17): mod_base = OTHER; note = 2-Prime-Fluoro modified nucleoside
  modified_base order(1..3,5..6,8,11,15,18..32): mod_base = OTHER; note = 2-Prime-O-Methyl modified nucleoside
  modified_base order(1^2,31^32): mod_base = OTHER; note = (1,3-dimethylimidazolidin-2-ylidene) Phosphoramidate linkage
  modified_base order(2..14,15..31): mod_base = OTHER; note = Phosphorothioate linkage
  modified_base 14^15: mod_base = OTHER; note = Methylphosphonate linkage
  misc_feature 1..32: note = RM110356

SEQ ID NO: 565 - DNA, 32 bp, synthetic construct; identical to SEQ ID NO: 133
  source 1..32: mol_type = other DNA
  misc_feature 10..11: note = DNA
  misc_feature order(1..9,12..32): note = RNA
  modified_base 9: mod_base = OTHER; note = 2-Prime-O-Methoxyethyl modified nucleoside
  modified_base 10: mod_base = OTHER; note = DNA nucleotide carrying a 6-amino-5-nitro-3-yl-2(1H)-pyridone nucleobase
  modified_base order(1,4,6..7,13..14): mod_base = OTHER; note = 2-Prime-Fluoro modified nucleoside
  modified_base order(2..3,5,8,12,15..32): mod_base = OTHER; note = 2-Prime-O-Methyl modified nucleoside
  modified_base order(1^2,31^32): mod_base = OTHER; note = (1,3-dimethylimidazolidin-2-ylidene) Phosphoramidate linkage
  modified_base order(2..11,12..31): mod_base = OTHER; note = Phosphorothioate linkage
  modified_base 11^12: mod_base = OTHER; note = Methylphosphonate linkage
  misc_feature 1..32: note = RM110357

SEQ ID NO: 566 - DNA, 23 bp, synthetic construct
  source 1..23: mol_type = other DNA
  misc_feature 12..13: note = DNA
  misc_feature order(1..11,14..23): note = RNA
  modified_base 11: mod_base = OTHER; note = 2-Prime-O-Methoxyethyl modified nucleoside
  modified_base 12: mod_base = OTHER; note = DNA nucleotide carrying a 6-amino-5-nitro-3-yl-2(1H)-pyridone nucleobase
  modified_base order(10,15,17..18,20,23): mod_base = OTHER; note = 2-Prime-Fluoro modified nucleoside
  modified_base order(1..9,14,16,19,21..22): mod_base = OTHER; note = 2-Prime-O-Methyl modified nucleoside
  modified_base order(1^2,22^23): mod_base = OTHER; note = (1,3-dimethylimidazolidin-2-ylidene) Phosphoramidate linkage
  modified_base order(2..13,14..22): mod_base = OTHER; note = Phosphorothioate linkage
  modified_base 13^14: mod_base = OTHER; note = Methylphosphonate linkage
  misc_feature 1..23: note = RM110358
acctctgaggantgggttcattt

SEQ ID NO: 567 - DNA, 23 bp, synthetic construct
  source 1..23: mol_type = other DNA
  misc_feature 9..10: note = DNA
  misc_feature order(1..8,11..23): note = RNA
  modified_base 8: mod_base = OTHER; note = 2-Prime-O-Methoxyethyl modified nucleoside
  modified_base 9: mod_base = OTHER; note = DNA nucleotide carrying a 6-amino-5-nitro-3-yl-2(1H)-pyridone nucleobase
  modified_base order(7,12,14..15,17,20): mod_base = OTHER; note = 2-Prime-Fluoro modified nucleoside
  modified_base order(1..6,11,13,16,18..19,21..23): mod_base = OTHER; note = 2-Prime-O-Methyl modified nucleoside
  modified_base order(1^2,22^23): mod_base = OTHER; note = (1,3-dimethylimidazolidin-2-ylidene) Phosphoramidate linkage
  modified_base order(2..10,11..22): mod_base = OTHER; note = Phosphorothioate linkage
  modified_base 10^11: mod_base = OTHER; note = Methylphosphonate linkage
  misc_feature 1..23: note = RM110359
tctgaggantgggttcatttttc

SEQ ID NO: 568 - DNA, 23 bp, synthetic construct
  source 1..23: mol_type = other DNA
  misc_feature 6..7: note = DNA
  misc_feature order(1..5,8..23): note = RNA
  modified_base 5: mod_base = OTHER; note = 2-Prime-O-Methoxyethyl modified nucleoside
  modified_base 6: mod_base = OTHER; note = DNA nucleotide carrying a 6-amino-5-nitro-3-yl-2(1H)-pyridone nucleobase
  modified_base order(4,9,11..12,14,17): mod_base = OTHER; note = 2-Prime-Fluoro modified nucleoside
  modified_base order(1..3,8,10,13,15..16,18..23): mod_base = OTHER; note = 2-Prime-O-Methyl modified nucleoside
  modified_base order(1^2,22^23): mod_base = OTHER; note = (1,3-dimethylimidazolidin-2-ylidene) Phosphoramidate linkage
  modified_base order(2..7,8..22): mod_base = OTHER; note = Phosphorothioate linkage
  modified_base 7^8: mod_base = OTHER; note = Methylphosphonate linkage
  misc_feature 1..23: note = RM110360
gaggantgggttcatttttcttg

SEQ ID NO: 569 - DNA, 32 bp, synthetic construct; identical to SEQ ID NO: 19
  source 1..32: mol_type = other DNA
  misc_feature 19..20: note = DNA
  misc_feature order(1..18,21..32): note = RNA
  modified_base 18: mod_base = OTHER; note = 2-Prime-O-Methoxyethyl modified nucleoside
  modified_base 19: mod_base = OTHER; note = DNA nucleotide carrying a 6-amino-5-nitro-3-yl-2(1H)-pyridone nucleobase
  modified_base order(17,22,24..25,27,30): mod_base = OTHER; note = 2-Prime-Fluoro modified nucleoside
  modified_base order(1..16,21,23,26,28..29,31..32): mod_base = OTHER; note = 2-Prime-O-Methyl modified nucleoside
  modified_base order(1^2,31^32): mod_base = OTHER; note = (1,3-dimethylimidazolidin-2-ylidene) Phosphoramidate linkage
  modified_base order(2..20,21..31): mod_base = OTHER; note = Phosphorothioate linkage
  modified_base 20^21: mod_base = OTHER; note = Methylphosphonate linkage
  misc_feature 1..32: note = RM110361

SEQ ID NO: 570 - DNA, 32 bp, synthetic construct; identical to SEQ ID NO: 131
  source 1..32: mol_type = other DNA
  misc_feature 16..17: note = DNA
  misc_feature order(1..15,18..32): note = RNA
  modified_base 15: mod_base = OTHER; note = 2-Prime-O-Methoxyethyl modified nucleoside
  modified_base 16: mod_base = OTHER; note = DNA nucleotide carrying a 6-amino-5-nitro-3-yl-2(1H)-pyridone nucleobase
  modified_base order(14,19,21..22,24,27): mod_base = OTHER; note = 2-Prime-Fluoro modified nucleoside
  modified_base order(1..13,18,20,23,25..26,28..32): mod_base = OTHER; note = 2-Prime-O-Methyl modified nucleoside
  modified_base order(1^2,31^32): mod_base = OTHER; note = (1,3-dimethylimidazolidin-2-ylidene) Phosphoramidate linkage
  modified_base order(2..17,18..31): mod_base = OTHER; note = Phosphorothioate linkage
  modified_base 17^18: mod_base = OTHER; note = Methylphosphonate linkage
  misc_feature 1..32: note = RM110362

SEQ ID NO: 571 - DNA, 32 bp, synthetic construct; identical to SEQ ID NO: 132
  source 1..32: mol_type = other DNA
  misc_feature 13..14: note = DNA
  misc_feature order(1..12,15..32): note = RNA
  modified_base 12: mod_base = OTHER; note = 2-Prime-O-Methoxyethyl modified nucleoside
  modified_base 13: mod_base = OTHER; note = DNA nucleotide carrying a 6-amino-5-nitro-3-yl-2(1H)-pyridone nucleobase
  modified_base order(11,16,18..19,21,24): mod_base = OTHER; note = 2-Prime-Fluoro modified nucleoside
  modified_base order(1..10,15,17,20,22..23,25..32): mod_base = OTHER; note = 2-Prime-O-Methyl modified nucleoside
  modified_base order(1^2,31^32): mod_base = OTHER; note = (1,3-dimethylimidazolidin-2-ylidene) Phosphoramidate linkage
  modified_base order(2..14,15..31): mod_base = OTHER; note = Phosphorothioate linkage
  modified_base 14^15: mod_base = OTHER; note = Methylphosphonate linkage
  misc_feature 1..32: note = RM110363

SEQ ID NO: 572 - DNA, 32 bp, synthetic construct; identical to SEQ ID NO: 133
  source 1..32: mol_type = other DNA
  misc_feature 10..11: note = DNA
  misc_feature order(1..9,12..32): note = RNA
  modified_base 9: mod_base = OTHER; note = 2-Prime-O-Methoxyethyl modified nucleoside
  modified_base 10: mod_base = OTHER; note = DNA nucleotide carrying a 6-amino-5-nitro-3-yl-2(1H)-pyridone nucleobase
  modified_base order(8,13,15..16,18,21): mod_base = OTHER; note = 2-Prime-Fluoro modified nucleoside
  modified_base order(1..7,12,14,17,19..20,22..32): mod_base = OTHER; note = 2-Prime-O-Methyl modified nucleoside
  modified_base order(1^2,31^32): mod_base = OTHER; note = (1,3-dimethylimidazolidin-2-ylidene) Phosphoramidate linkage
  modified_base order(2..11,12..31): mod_base = OTHER; note = Phosphorothioate linkage
  modified_base 11^12: mod_base = OTHER; note = Methylphosphonate linkage
  misc_feature 1..32: note = RM110364

SEQ ID NO: 573 - DNA, 32 bp, synthetic construct; identical to SEQ ID NO: 134
  source 1..32: mol_type = other DNA
  misc_feature 7..8: note = DNA
  misc_feature order(1..6,9..32): note = RNA
  modified_base 6: mod_base = OTHER; note = 2-Prime-O-Methoxyethyl modified nucleoside
  modified_base 7: mod_base = OTHER; note = DNA nucleotide carrying a 6-amino-5-nitro-3-yl-2(1H)-pyridone nucleobase
  modified_base order(5,10,12..13,15,18): mod_base = OTHER; note = 2-Prime-Fluoro modified nucleoside
  modified_base order(1..4,9,11,14,16..17,19..32): mod_base = OTHER; note = 2-Prime-O-Methyl modified nucleoside
  modified_base order(1^2,31^32): mod_base = OTHER; note = (1,3-dimethylimidazolidin-2-ylidene) Phosphoramidate linkage
  modified_base order(2..8,9..31): mod_base = OTHER; note = Phosphorothioate linkage
  modified_base 8^9: mod_base = OTHER; note = Methylphosphonate linkage
  misc_feature 1..32: note = RM110365

SEQ ID NO: 574 - DNA, 32 bp, synthetic construct; identical to SEQ ID NO: 19
  source 1..32: mol_type = other DNA
  misc_feature 19..20: note = DNA
  misc_feature order(1..18,21..32): note = RNA
  modified_base 18: mod_base = OTHER; note = 2-Prime-O-Methoxyethyl modified nucleoside
  modified_base 19: mod_base = OTHER; note = DNA nucleotide carrying a 6-amino-5-nitro-3-yl-2(1H)-pyridone nucleobase
  modified_base order(1,4,7,22..23,31): mod_base = OTHER; note = 2-Prime-Fluoro modified nucleoside
  modified_base order(2..3,5..6,8..17,21,24..30,32): mod_base = OTHER; note = 2-Prime-O-Methyl modified nucleoside
  modified_base order(1^2,31^32): mod_base = OTHER; note = (1,3-dimethylimidazolidin-2-ylidene) Phosphoramidate linkage
  modified_base order(2..20,21..31): mod_base = OTHER; note = Phosphorothioate linkage
  modified_base 20^21: mod_base = OTHER; note = Methylphosphonate linkage
  misc_feature 1..32: note = RM110366

SEQ ID NO: 575 - DNA, 23 bp, synthetic construct
  source 1..23: mol_type = other DNA
  misc_feature 18..19: note = DNA
  misc_feature order(1..17,20..23): note = RNA
  modified_base 17: mod_base = OTHER; note = 2-Prime-O-Methoxyethyl modified nucleoside
  modified_base 18: mod_base = OTHER; note = DNA nucleotide carrying a 6-amino-5-nitro-3-yl-2(1H)-pyridone nucleobase
  modified_base order(3,6,21..22): mod_base = OTHER; note = 2-Prime-Fluoro modified nucleoside
  modified_base order(1..2,4..5,7..16,20,23): mod_base = OTHER; note = 2-Prime-O-Methyl modified nucleoside
  modified_base order(1^2,22^23): mod_base = OTHER; note = (1,3-dimethylimidazolidin-2-ylidene) Phosphoramidate linkage
  modified_base order(2..19,20..22): mod_base = OTHER; note = Phosphorothioate linkage
  modified_base 19^20: mod_base = OTHER; note = Methylphosphonate linkage
  misc_feature 1..23: note = RM110367
ggtcaaacctctgaggantgggt

SEQ ID NO: 576 - DNA, 23 bp, synthetic construct
  source 1..23: mol_type = other DNA
  misc_feature 6..7: note = DNA
  misc_feature order(1..5,8..23): note = RNA
  modified_base 5: mod_base = OTHER; note = 2-Prime-O-Methoxyethyl modified nucleoside
  modified_base 6: mod_base = OTHER; note = DNA nucleotide carrying a 6-amino-5-nitro-3-yl-2(1H)-pyridone nucleobase
  modified_base order(4,9,20,23): mod_base = OTHER; note = 2-Prime-Fluoro modified nucleoside
  modified_base order(1..3,8,10..19,21..22): mod_base = OTHER; note = 2-Prime-O-Methyl modified nucleoside
  modified_base order(1^2,22^23): mod_base = OTHER; note = (1,3-dimethylimidazolidin-2-ylidene) Phosphoramidate linkage
  modified_base order(2..7,8..22): mod_base = OTHER; note = Phosphorothioate linkage
  modified_base 7^8: mod_base = OTHER; note = Methylphosphonate linkage
  misc_feature 1..23: note = RM110368
gaggantgggttcatttttcttg

SEQ ID NO: 577 - DNA, 32 bp, synthetic construct; identical to SEQ ID NO: 129
  source 1..32: mol_type = other DNA
  misc_feature 22..23: note = DNA
  misc_feature order(1..21,24..32): note = RNA
  modified_base 21: mod_base = OTHER; note = 2-Prime-O-Methoxyethyl modified nucleoside
  modified_base 22: mod_base = OTHER; note = DNA nucleotide carrying a 6-amino-5-nitro-3-yl-2(1H)-pyridone nucleobase
  modified_base order(12,15,18,20,25,27,29,31..32): mod_base = OTHER; note = 2-Prime-Fluoro modified nucleoside
  modified_base order(1..11,13..14,16..17,19,24,26,28,30): mod_base = OTHER; note = 2-Prime-O-Methyl modified nucleoside
  modified_base order(1^2,31^32): mod_base = OTHER; note = (1,3-dimethylimidazolidin-2-ylidene) Phosphoramidate linkage
  modified_base order(2..23,24..31): mod_base = OTHER; note = Phosphorothioate linkage
  modified_base 23^24: mod_base = OTHER; note = Methylphosphonate linkage
  misc_feature 1..32: note = RM110369

SEQ ID NO: 578 - DNA, 32 bp, synthetic construct; identical to SEQ ID NO: 19
  source 1..32: mol_type = other DNA
  misc_feature 19..20: note = DNA
  misc_feature order(1..18,21..32): note = RNA
  modified_base 18: mod_base = OTHER; note = 2-Prime-O-Methoxyethyl modified nucleoside
  modified_base 19: mod_base = OTHER; note = DNA nucleotide carrying a 6-amino-5-nitro-3-yl-2(1H)-pyridone nucleobase
  modified_base order(9,12,15,17,22,24,26,28..29): mod_base = OTHER; note = 2-Prime-Fluoro modified nucleoside
  modified_base order(1..8,10..11,13..14,16,21,23,25,27,30..32): mod_base = OTHER; note = 2-Prime-O-Methyl modified nucleoside
  modified_base order(1^2,31^32): mod_base = OTHER; note = (1,3-dimethylimidazolidin-2-ylidene) Phosphoramidate linkage
  modified_base order(2..20,21..31): mod_base = OTHER; note = Phosphorothioate linkage
  modified_base 20^21: mod_base = OTHER; note = Methylphosphonate linkage
  misc_feature 1..32: note = RM110370

SEQ ID NO: 579 - DNA, 32 bp, synthetic construct; identical to SEQ ID NO: 131
  source 1..32: mol_type = other DNA
  misc_feature 16..17: note = DNA
  misc_feature order(1..15,18..32): note = RNA
  modified_base 15: mod_base = OTHER; note = 2-Prime-O-Methoxyethyl modified nucleoside
  modified_base 16: mod_base = OTHER; note = DNA nucleotide carrying a 6-amino-5-nitro-3-yl-2(1H)-pyridone nucleobase
  modified_base order(6,9,12,14,19,21,23,25..26): mod_base = OTHER; note = 2-Prime-Fluoro modified nucleoside
  modified_base order(1..5,7..8,10..11,13,18,20,22,24,27..32): mod_base = OTHER; note = 2-Prime-O-Methyl modified nucleoside
  modified_base order(1^2,31^32): mod_base = OTHER; note = (1,3-dimethylimidazolidin-2-ylidene) Phosphoramidate linkage
  modified_base order(2..17,18..31): mod_base = OTHER; note = Phosphorothioate linkage
  modified_base 17^18: mod_base = OTHER; note = Methylphosphonate linkage
  misc_feature 1..32: note = RM110371

SEQ ID NO: 580 - DNA, 32 bp, synthetic construct; identical to SEQ ID NO: 132
  source 1..32: mol_type = other DNA
  misc_feature 13..14: note = DNA
  misc_feature order(1..12,15..32): note = RNA
  modified_base 12: mod_base = OTHER; note = 2-Prime-O-Methoxyethyl modified nucleoside
  modified_base 13: mod_base = OTHER; note = DNA nucleotide carrying a 6-amino-5-nitro-3-yl-2(1H)-pyridone nucleobase
  modified_base order(3,6,9,11,16,18,20,22..23): mod_base = OTHER; note = 2-Prime-Fluoro modified nucleoside
  modified_base order(1..2,4..5,7..8,10,15,17,19,21,24..32): mod_base = OTHER; note = 2-Prime-O-Methyl modified nucleoside
  modified_base order(1^2,31^32): mod_base = OTHER; note = (1,3-dimethylimidazolidin-2-ylidene) Phosphoramidate linkage
  modified_base order(2..14,15..31): mod_base = OTHER; note = Phosphorothioate linkage
  modified_base 14^15: mod_base = OTHER; note = Methylphosphonate linkage
  misc_feature 1..32: note = RM110372

SEQ ID NO: 581 - DNA, 32 bp, synthetic construct; identical to SEQ ID NO: 19
  source 1..32: mol_type = other DNA
  misc_feature 19..20: note = DNA
  misc_feature order(1..18,21..32): note = RNA
  modified_base 18: mod_base = OTHER; note = 2-Prime-O-Methoxyethyl modified nucleoside
  modified_base 19: mod_base = OTHER; note = DNA nucleotide carrying a 6-amino-5-nitro-3-yl-2(1H)-pyridone nucleobase
  modified_base order(11..12,14,16,22..23,25,28,31): mod_base = OTHER; note = 2-Prime-Fluoro modified nucleoside
  modified_base order(1..10,13,15,17,21,24,26..27,29..30,32): mod_base = OTHER; note = 2-Prime-O-Methyl modified nucleoside
  modified_base order(1^2,31^32): mod_base = OTHER; note = (1,3-dimethylimidazolidin-2-ylidene) Phosphoramidate linkage
  modified_base order(2..20,21..31): mod_base = OTHER; note = Phosphorothioate linkage
  modified_base 20^21: mod_base = OTHER; note = Methylphosphonate linkage
  misc_feature 1..32: note = RM110373

SEQ ID NO: 582 - DNA, 32 bp, synthetic construct; identical to SEQ ID NO: 131
  source 1..32: mol_type = other DNA
  misc_feature 16..17: note = DNA
  misc_feature order(1..15,18..32): note = RNA
  modified_base 15: mod_base = OTHER; note = 2-Prime-O-Methoxyethyl modified nucleoside
  modified_base 16: mod_base = OTHER; note = DNA nucleotide carrying a 6-amino-5-nitro-3-yl-2(1H)-pyridone nucleobase
  modified_base order(8..9,11,13,19..20,22,25,28): mod_base = OTHER; note = 2-Prime-Fluoro modified nucleoside
  modified_base order(1..7,10,12,14,18,21,23..24,26..27,29..32): mod_base = OTHER; note = 2-Prime-O-Methyl modified nucleoside
  modified_base order(1^2,31^32): mod_base = OTHER; note = (1,3-dimethylimidazolidin-2-ylidene) Phosphoramidate linkage
  modified_base order(2..17,18..31): mod_base = OTHER; note = Phosphorothioate linkage
  modified_base 17^18: mod_base = OTHER; note = Methylphosphonate linkage
  misc_feature 1..32: note = RM110374

SEQ ID NO: 583 - DNA, 32 bp, synthetic construct; identical to SEQ ID NO: 132
  source 1..32: mol_type = other DNA
  misc_feature 13..14: note = DNA
  misc_feature order(1..12,15..32): note = RNA
  modified_base 12: mod_base = OTHER; note = 2-Prime-O-Methoxyethyl modified nucleoside
  modified_base 13: mod_base = OTHER; note = DNA nucleotide carrying a 6-amino-5-nitro-3-yl-2(1H)-pyridone nucleobase
  modified_base order(5..6,8,10,16..17,19,22,25): mod_base = OTHER; note = 2-Prime-Fluoro modified nucleoside
  modified_base order(1..4,7,9,11,15,18,20..21,23..24,26..32): mod_base = OTHER; note = 2-Prime-O-Methyl modified nucleoside
  modified_base order(1^2,31^32): mod_base = OTHER; note = (1,3-dimethylimidazolidin-2-ylidene) Phosphoramidate linkage
  modified_base order(2..14,15..31): mod_base = OTHER; note = Phosphorothioate linkage
  modified_base 14^15: mod_base = OTHER; note = Methylphosphonate linkage
  misc_feature 1..32: note = RM110375

SEQ ID NO: 584 - DNA, 32 bp, synthetic construct; identical to SEQ ID NO: 133
  source 1..32: mol_type = other DNA
  misc_feature 10..11: note = DNA
  misc_feature order(1..9,12..32): note = RNA
  modified_base 9: mod_base = OTHER; note = 2-Prime-O-Methoxyethyl modified nucleoside
  modified_base 10: mod_base = OTHER; note = DNA nucleotide carrying a 6-amino-5-nitro-3-yl-2(1H)-pyridone nucleobase
  modified_base order(2..3,5,7,13..14,16,19,22): mod_base = OTHER; note = 2-Prime-Fluoro modified nucleoside
  modified_base order(1,4,6,8,12,15,17..18,20..21,23..32): mod_base = OTHER; note = 2-Prime-O-Methyl modified nucleoside
  modified_base order(1^2,31^32): mod_base = OTHER; note = (1,3-dimethylimidazolidin-2-ylidene) Phosphoramidate linkage
  modified_base order(2..11,12..31): mod_base = OTHER; note = Phosphorothioate linkage
  modified_base 11^12: mod_base = OTHER; note = Methylphosphonate linkage
  misc_feature 1..32: note = RM110376

SEQ ID NO: 585 - DNA, 23 bp, synthetic construct
  source 1..23: mol_type = other DNA
  misc_feature 15..16: note = DNA
  misc_feature order(1..14,17..23): note = RNA
  modified_base 14: mod_base = OTHER; note = 2-Prime-O-Methoxyethyl modified nucleoside
  modified_base 15: mod_base = OTHER; note = DNA nucleotide carrying a 6-amino-5-nitro-3-yl-2(1H)-pyridone nucleobase
  modified_base order(8,11,13,18,20,22): mod_base = OTHER; note = 2-Prime-Fluoro modified nucleoside
  modified_base order(1..7,9..10,12,17,19,21,23): mod_base = OTHER; note = 2-Prime-O-Methyl modified nucleoside
  modified_base order(1^2,22^23): mod_base = OTHER; note = (1,3-dimethylimidazolidin-2-ylidene) Phosphoramidate linkage
  modified_base order(2..16,17..22): mod_base = OTHER; note = Phosphorothioate linkage
  modified_base 16^17: mod_base = OTHER; note = Methylphosphonate linkage
  misc_feature 1..23: note = RM110377
caaacctctgaggantgggttca

SEQ ID NO: 586 - DNA, 23 bp, synthetic construct
  source 1..23: mol_type = other DNA
  misc_feature 12..13: note = DNA
  misc_feature order(1..11,14..23): note = RNA
  modified_base 11: mod_base = OTHER; note = 2-Prime-O-Methoxyethyl modified nucleoside
  modified_base 12: mod_base = OTHER; note = DNA nucleotide carrying a 6-amino-5-nitro-3-yl-2(1H)-pyridone nucleobase
  modified_base order(5,8,10,15,17,19): mod_base = OTHER; note = 2-Prime-Fluoro modified nucleoside
  modified_base order(1..4,6..7,9,14,16,18,20..23): mod_base = OTHER; note = 2-Prime-O-Methyl modified nucleoside
  modified_base order(1^2,22^23): mod_base = OTHER; note = (1,3-dimethylimidazolidin-2-ylidene) Phosphoramidate linkage
  modified_base order(2..13,14..22): mod_base = OTHER; note = Phosphorothioate linkage
  modified_base 13^14: mod_base = OTHER; note = Methylphosphonate linkage
  misc_feature 1..23: note = RM110378
acctctgaggantgggttcattt

SEQ ID NO: 587 - DNA, 23 bp, synthetic construct
  source 1..23: mol_type = other DNA
  misc_feature 9..10: note = DNA
  misc_feature order(1..8,11..23): note = RNA
  modified_base 8: mod_base = OTHER; note = 2-Prime-O-Methoxyethyl modified nucleoside
  modified_base 9: mod_base = OTHER; note = DNA nucleotide carrying a 6-amino-5-nitro-3-yl-2(1H)-pyridone nucleobase
  modified_base order(2,5,7,12,14,16): mod_base = OTHER; note = 2-Prime-Fluoro modified nucleoside
  modified_base order(1,3..4,6,11,13,15,17..23): mod_base = OTHER; note = 2-Prime-O-Methyl modified nucleoside
  modified_base order(1^2,22^23): mod_base = OTHER; note = (1,3-dimethylimidazolidin-2-ylidene) Phosphoramidate linkage
  modified_base order(2..10,11..22): mod_base = OTHER; note = Phosphorothioate linkage
  modified_base 10^11: mod_base = OTHER; note = Methylphosphonate linkage
  misc_feature 1..23: note = RM110379
tctgaggantgggttcatttttc

SEQ ID NO: 588 - DNA, 32 bp, synthetic construct; identical to SEQ ID NO: 128
  source 1..32: mol_type = other DNA
  misc_feature 25..26: note = DNA
  misc_feature order(1..24,27..32): note = RNA
  modified_base 24: mod_base = OTHER; note = 2-Prime-O-Methoxyethyl modified nucleoside
  modified_base 25: mod_base = OTHER; note = DNA nucleotide carrying a 6-amino-5-nitro-3-yl-2(1H)-pyridone nucleobase
  modified_base order(18,21,23,28,30,32): mod_base = OTHER; note = 2-Prime-Fluoro modified nucleoside
  modified_base order(1..17,19..20,22,27,29,31): mod_base = OTHER; note = 2-Prime-O-Methyl modified nucleoside
  modified_base order(1^2,31^32): mod_base = OTHER; note = (1,3-dimethylimidazolidin-2-ylidene) Phosphoramidate linkage
  modified_base order(2..26,27..31): mod_base = OTHER; note = Phosphorothioate linkage
  modified_base 26^27: mod_base = OTHER; note = Methylphosphonate linkage
  misc_feature 1..32: note = RM110380

SEQ ID NO: 589 - DNA, 32 bp, synthetic construct; identical to SEQ ID NO: 129
  source 1..32: mol_type = other DNA
  misc_feature 22..23: note = DNA
  misc_feature order(1..21,24..32): note = RNA
  modified_base 21: mod_base = OTHER; note = 2-Prime-O-Methoxyethyl modified nucleoside
  modified_base 22: mod_base = OTHER; note = DNA nucleotide carrying a 6-amino-5-nitro-3-yl-2(1H)-pyridone nucleobase
  modified_base order(15,18,20,25,27,29): mod_base = OTHER; note = 2-Prime-Fluoro modified nucleoside
  modified_base order(1..14,16..17,19,24,26,28,30..32): mod_base = OTHER; note = 2-Prime-O-Methyl modified nucleoside
  modified_base order(1^2,31^32): mod_base = OTHER; note = (1,3-dimethylimidazolidin-2-ylidene) Phosphoramidate linkage
  modified_base order(2..23,24..31): mod_base = OTHER; note = Phosphorothioate linkage
  modified_base 23^24: mod_base = OTHER; note = Methylphosphonate linkage
  misc_feature 1..32: note = RM110381

SEQ ID NO: 590 - DNA, 32 bp, synthetic construct; identical to SEQ ID NO: 19
  source 1..32: mol_type = other DNA
  misc_feature 19..20: note = DNA
  misc_feature order(1..18,21..32): note = RNA
  modified_base 18: mod_base = OTHER; note = 2-Prime-O-Methoxyethyl modified nucleoside
  modified_base 19: mod_base = OTHER; note = DNA nucleotide carrying a 6-amino-5-nitro-3-yl-2(1H)-pyridone nucleobase
  modified_base order(12,15,17,22,24,26): mod_base = OTHER; note = 2-Prime-Fluoro modified nucleoside
  modified_base order(1..11,13..14,16,21,23,25,27..32): mod_base = OTHER; note = 2-Prime-O-Methyl modified nucleoside
  modified_base order(1^2,31^32): mod_base = OTHER; note = (1,3-dimethylimidazolidin-2-ylidene) Phosphoramidate linkage
  modified_base order(2..20,21..31): mod_base = OTHER; note = Phosphorothioate linkage
  modified_base 20^21: mod_base = OTHER; note = Methylphosphonate linkage
  misc_feature 1..32: note = RM110382

SEQ ID NO: 591 - DNA, 32 bp, synthetic construct; identical to SEQ ID NO: 131
  source 1..32: mol_type = other DNA
  misc_feature 16..17: note = DNA
  misc_feature order(1..15,18..32): note = RNA
  modified_base 15: mod_base = OTHER; note = 2-Prime-O-Methoxyethyl modified nucleoside
  modified_base 16: mod_base = OTHER; note = DNA nucleotide carrying a 6-amino-5-nitro-3-yl-2(1H)-pyridone nucleobase
  modified_base order(9,12,14,19,21,23): mod_base = OTHER; note = 2-Prime-Fluoro modified nucleoside
  modified_base order(1..8,10..11,13,18,20,22,24..32): mod_base = OTHER; note = 2-Prime-O-Methyl modified nucleoside
  modified_base order(1^2,31^32): mod_base = OTHER; note = (1,3-dimethylimidazolidin-2-ylidene) Phosphoramidate linkage
  modified_base order(2..17,18..31): mod_base = OTHER; note = Phosphorothioate linkage
  modified_base 17^18: mod_base = OTHER; note = Methylphosphonate linkage
  misc_feature 1..32: note = RM110383

SEQ ID NO: 592 - DNA, 32 bp, synthetic construct; identical to SEQ ID NO: 132
  source 1..32: mol_type = other DNA
  misc_feature 13..14: note = DNA
  misc_feature order(1..12,15..32): note = RNA
  modified_base 12: mod_base = OTHER; note = 2-Prime-O-Methoxyethyl modified nucleoside
  modified_base 13: mod_base = OTHER; note = DNA nucleotide carrying a 6-amino-5-nitro-3-yl-2(1H)-pyridone nucleobase
  modified_base order(6,9,11,16,18,20): mod_base = OTHER; note = 2-Prime-Fluoro modified nucleoside
  modified_base order(1..5,7..8,10,15,17,19,21..32): mod_base = OTHER; note = 2-Prime-O-Methyl modified nucleoside
  modified_base order(1^2,31^32): mod_base = OTHER; note = (1,3-dimethylimidazolidin-2-ylidene) Phosphoramidate linkage
  modified_base order(2..14,15..31): mod_base = OTHER; note = Phosphorothioate linkage
  modified_base 14^15: mod_base = OTHER; note = Methylphosphonate linkage
  misc_feature 1..32: note = RM110384

SEQ ID NO: 593 - DNA, 32 bp, synthetic construct; identical to SEQ ID NO: 133
  source 1..32: mol_type = other DNA
  misc_feature 10..11: note = DNA
  misc_feature order(1..9,12..32): note = RNA
  modified_base 9: mod_base = OTHER; note = 2-Prime-O-Methoxyethyl modified nucleoside
  modified_base 10: mod_base = OTHER; note = DNA nucleotide carrying a 6-amino-5-nitro-3-yl-2(1H)-pyridone nucleobase
  modified_base order(3,6,8,13,15,17): mod_base = OTHER; note = 2-Prime-Fluoro modified nucleoside
  modified_base order(1..2,4..5,7,12,14,16,18..32): mod_base = OTHER; note = 2-Prime-O-Methyl modified nucleoside
  modified_base order(1^2,31^32): mod_base = OTHER; note = (1,3-dimethylimidazolidin-2-ylidene) Phosphoramidate linkage
  modified_base order(2..11,12..31): mod_base = OTHER; note = Phosphorothioate linkage
  modified_base 11^12: mod_base = OTHER; note = Methylphosphonate linkage
  misc_feature 1..32: note = RM110385

SEQ ID NO: 594 - DNA, 23 bp, synthetic construct
  source 1..23: mol_type = other DNA
  misc_feature 12..13: note = DNA
  misc_feature order(1..11,14..23): note = RNA
  modified_base 11: mod_base = OTHER; note = 2-Prime-O-Methoxyethyl modified nucleoside
  modified_base 12: mod_base = OTHER; note = DNA nucleotide carrying a 6-amino-5-nitro-3-yl-2(1H)-pyridone nucleobase
  modified_base order(7,9,15..16,18,21): mod_base = OTHER; note = 2-Prime-Fluoro modified nucleoside
  modified_base order(1..6,8,10,14,17,19..20,22..23): mod_base = OTHER; note = 2-Prime-O-Methyl modified nucleoside
  modified_base order(1^2,22^23): mod_base = OTHER; note = (1,3-dimethylimidazolidin-2-ylidene) Phosphoramidate linkage
  modified_base order(2..13,14..22): mod_base = OTHER; note = Phosphorothioate linkage
  modified_base 13^14: mod_base = OTHER; note = Methylphosphonate linkage
  misc_feature 1..23: note = RM110386
acctctgaggantgggttcattt

SEQ ID NO: 595 - DNA, 23 bp, synthetic construct
  source 1..23: mol_type = other DNA
  misc_feature 9..10: note = DNA
  misc_feature order(1..8,11..23): note = RNA
  modified_base 8: mod_base = OTHER; note = 2-Prime-O-Methoxyethyl modified nucleoside
  modified_base 9: mod_base = OTHER; note = DNA nucleotide carrying a 6-amino-5-nitro-3-yl-2(1H)-pyridone nucleobase
  modified_base order(4,6,12..13,15,18): mod_base = OTHER; note = 2-Prime-Fluoro modified nucleoside
  modified_base order(1..3,5,7,11,14,16..17,19..23): mod_base = OTHER; note = 2-Prime-O-Methyl modified nucleoside
  modified_base order(1^2,22^23): mod_base = OTHER; note = (1,3-dimethylimidazolidin-2-ylidene) Phosphoramidate linkage
  modified_base order(2..10,11..22): mod_base = OTHER; note = Phosphorothioate linkage
  modified_base 10^11: mod_base = OTHER; note = Methylphosphonate linkage
  misc_feature 1..23: note = RM110387
tctgaggantgggttcatttttc

SEQ ID NO: 596 - DNA, 23 bp, synthetic construct
  source 1..23: mol_type = other DNA
  misc_feature 6..7: note = DNA
  misc_feature order(1..5,8..23): note = RNA
  modified_base 5: mod_base = OTHER; note = 2-Prime-O-Methoxyethyl modified nucleoside
  modified_base 6: mod_base = OTHER; note = DNA nucleotide carrying a 6-amino-5-nitro-3-yl-2(1H)-pyridone nucleobase
  modified_base order(1,3,9..10,12,15): mod_base = OTHER; note = 2-Prime-Fluoro modified nucleoside
  modified_base order(2,4,8,11,13..14,16..23): mod_base = OTHER; note = 2-Prime-O-Methyl modified nucleoside
  modified_base order(1^2,22^23): mod_base = OTHER; note = (1,3-dimethylimidazolidin-2-ylidene) Phosphoramidate linkage
  modified_base order(2..7,8..22): mod_base = OTHER; note = Phosphorothioate linkage
  modified_base 7^8: mod_base = OTHER; note = Methylphosphonate linkage
  misc_feature 1..23: note = RM110388
gaggantgggttcatttttcttg

SEQ ID NO: 597 - DNA, 32 bp, synthetic construct; identical to SEQ ID NO: 129
  source 1..32: mol_type = other DNA
  misc_feature 22..23: note = DNA
  misc_feature order(1..21,24..32): note = RNA
  modified_base 21: mod_base = OTHER; note = 2-Prime-O-Methoxyethyl modified nucleoside
  modified_base 22: mod_base = OTHER; note = DNA nucleotide carrying a 6-amino-5-nitro-3-yl-2(1H)-pyridone nucleobase
  modified_base order(17,19,25..26,28,31): mod_base = OTHER; note = 2-Prime-Fluoro modified nucleoside
  modified_base order(1..16,18,20,24,27,29..30,32): mod_base = OTHER; note = 2-Prime-O-Methyl modified nucleoside
  modified_base order(1^2,31^32): mod_base = OTHER; note = (1,3-dimethylimidazolidin-2-ylidene) Phosphoramidate linkage
  modified_base order(2..23,24..31): mod_base = OTHER; note = Phosphorothioate linkage
  modified_base 23^24: mod_base = OTHER; note = Methylphosphonate linkage
  misc_feature 1..32: note = RM110389

SEQ ID NO: 598 - DNA, 32 bp, synthetic construct; identical to SEQ ID NO: 19
  source 1..32: mol_type = other DNA
  misc_feature 19..20: note = DNA
  misc_feature order(1..18,21..32): note = RNA
  modified_base 18: mod_base = OTHER; note = 2-Prime-O-Methoxyethyl modified nucleoside
  modified_base 19: mod_base = OTHER; note = DNA nucleotide carrying a 6-amino-5-nitro-3-yl-2(1H)-pyridone nucleobase
  modified_base order(14,16,22..23,25,28): mod_base = OTHER; note = 2-Prime-Fluoro modified nucleoside
  modified_base order(1..13,15,17,21,24,26..27,29..32): mod_base = OTHER; note = 2-Prime-O-Methyl modified nucleoside
  modified_base order(1^2,31^32): mod_base = OTHER; note = (1,3-dimethylimidazolidin-2-ylidene) Phosphoramidate linkage
  modified_base order(2..20,21..31): mod_base = OTHER; note = Phosphorothioate linkage
  modified_base 20^21: mod_base = OTHER; note = Methylphosphonate linkage
  misc_feature 1..32: note = RM110390

SEQ ID NO: 599 - DNA, 32 bp, synthetic construct; identical to SEQ ID NO: 131
  source 1..32: mol_type = other DNA
  misc_feature 16..17: note = DNA
  misc_feature order(1..15,18..32): note = RNA
  modified_base 15: mod_base = OTHER; note = 2-Prime-O-Methoxyethyl modified nucleoside
  modified_base 16: mod_base = OTHER; note = DNA nucleotide carrying a 6-amino-5-nitro-3-yl-2(1H)-pyridone nucleobase
  modified_base order(11,13,19..20,22,25): mod_base = OTHER; note = 2-Prime-Fluoro modified nucleoside
  modified_base order(1..10,12,14,18,21,23..24,26..32): mod_base = OTHER; note = 2-Prime-O-Methyl modified nucleoside
  modified_base order(1^2,31^32): mod_base = OTHER; note = (1,3-dimethylimidazolidin-2-ylidene) Phosphoramidate linkage
  modified_base order(2..17,18..31): mod_base = OTHER; note = Phosphorothioate linkage
  modified_base 17^18: mod_base = OTHER; note = Methylphosphonate linkage
  misc_feature 1..32: note = RM110391

SEQ ID NO: 600 - DNA, 32 bp, synthetic construct; identical to SEQ ID NO: 132
  source 1..32: mol_type = other DNA
  misc_feature 13..14: note = DNA
  misc_feature order(1..12,15..32): note = RNA
  modified_base 12: mod_base = OTHER; note = 2-Prime-O-Methoxyethyl modified nucleoside
  modified_base 13: mod_base = OTHER; note = DNA nucleotide carrying a 6-amino-5-nitro-3-yl-2(1H)-pyridone nucleobase
  modified_base order(8,10,16..17,19,22): mod_base = OTHER; note = 2-Prime-Fluoro modified nucleoside
  modified_base order(1..7,9,11,15,18,20..21,23..32): mod_base = OTHER; note = 2-Prime-O-Methyl modified nucleoside
  modified_base order(1^2,31^32): mod_base = OTHER; note = (1,3-dimethylimidazolidin-2-ylidene) Phosphoramidate linkage
  modified_base order(2..14,15..31): mod_base = OTHER; note = Phosphorothioate linkage
  modified_base 14^15: mod_base = OTHER; note = Methylphosphonate linkage
  misc_feature 1..32: note = RM110392

SEQ ID NO: 601 - DNA, 32 bp, synthetic construct; identical to SEQ ID NO: 133
  source 1..32: mol_type = other DNA
  misc_feature 10..11: note = DNA
  misc_feature order(1..9,12..32): note = RNA
  modified_base 9: mod_base = OTHER; note = 2-Prime-O-Methoxyethyl modified nucleoside
  modified_base 10: mod_base = OTHER; note = DNA nucleotide carrying a 6-amino-5-nitro-3-yl-2(1H)-pyridone nucleobase
  modified_base order(5,7,13..14,16,19): mod_base = OTHER; note = 2-Prime-Fluoro modified nucleoside
  modified_base order(1..4,6,8,12,15,17..18,20..32): mod_base = OTHER; note = 2-Prime-O-Methyl modified nucleoside
  modified_base order(1^2,31^32): mod_base = OTHER; note = (1,3-dimethylimidazolidin-2-ylidene) Phosphoramidate linkage
  modified_base order(2..11,12..31): mod_base = OTHER; note = Phosphorothioate linkage
  modified_base 11^12: mod_base = OTHER; note = Methylphosphonate linkage
  misc_feature 1..32: note = RM110393

SEQ ID NO: 602 - DNA, 32 bp, synthetic construct; identical to SEQ ID NO: 134
  source 1..32: mol_type = other DNA
  misc_feature 7..8: note = DNA
  misc_feature order(1..6,9..32): note = RNA
  modified_base 6: mod_base = OTHER; note = 2-Prime-O-Methoxyethyl modified nucleoside
  modified_base 7: mod_base = OTHER; note = DNA nucleotide carrying a 6-amino-5-nitro-3-yl-2(1H)-pyridone nucleobase
  modified_base order(2,4,10..11,13,16): mod_base = OTHER; note = 2-Prime-Fluoro modified nucleoside
  modified_base order(1,3,5,9,12,14..15,17..32): mod_base = OTHER; note = 2-Prime-O-Methyl modified nucleoside
  modified_base order(1^2,31^32): mod_base = OTHER; note = (1,3-dimethylimidazolidin-2-ylidene) Phosphoramidate linkage
  modified_base order(2..8,9..31): mod_base = OTHER; note = Phosphorothioate linkage
  modified_base 8^9: mod_base = OTHER; note = Methylphosphonate linkage
  misc_feature 1..32: note = RM110394

SEQ ID NO: 603 - DNA, 32 bp, synthetic construct; identical to SEQ ID NO: 127
  source 1..32: mol_type = other DNA
  misc_feature 28..29: note = DNA
  misc_feature order(1..27,30..32): note = RNA
  modified_base 27: mod_base = OTHER; note = 2-Prime-O-Methoxyethyl modified nucleoside
  modified_base 28: mod_base = OTHER; note = DNA nucleotide carrying a 6-amino-5-nitro-3-yl-2(1H)-pyridone nucleobase
  modified_base order(24,26,31): mod_base = OTHER; note = 2-Prime-Fluoro modified nucleoside
  modified_base order(1..23,25,30,32): mod_base = OTHER; note = 2-Prime-O-Methyl modified nucleoside
  modified_base order(1^2,31^32): mod_base = OTHER; note = (1,3-dimethylimidazolidin-2-ylidene) Phosphoramidate linkage
  modified_base order(2..29,30^31): mod_base = OTHER; note = Phosphorothioate linkage
  modified_base 29^30: mod_base = OTHER; note = Methylphosphonate linkage
  misc_feature 1..32: note = RM110395

SEQ ID NO: 604 - DNA, 32 bp, synthetic construct; identical to SEQ ID NO: 128
  source 1..32: mol_type = other DNA
  misc_feature 25..26: note = DNA
  misc_feature order(1..24,27..32): note = RNA
  modified_base 24: mod_base = OTHER; note = 2-Prime-O-Methoxyethyl modified nucleoside
  modified_base 25: mod_base = OTHER; note = DNA nucleotide carrying a 6-amino-5-nitro-3-yl-2(1H)-pyridone nucleobase
  modified_base order(21,23,28): mod_base = OTHER; note = 2-Prime-Fluoro modified nucleoside
  modified_base order(1..20,22,27,29..32): mod_base = OTHER; note = 2-Prime-O-Methyl modified nucleoside
  modified_base order(1^2,31^32): mod_base = OTHER; note = (1,3-dimethylimidazolidin-2-ylidene) Phosphoramidate linkage
  modified_base order(2..26,27..31): mod_base = OTHER; note = Phosphorothioate linkage
  modified_base 26^27: mod_base = OTHER; note = Methylphosphonate linkage
  misc_feature 1..32: note = RM110396

SEQ ID NO: 605 - DNA, 32 bp, synthetic construct; identical to SEQ ID NO: 129
  source 1..32: mol_type = other DNA
  misc_feature 22..23: note = DNA
  misc_feature order(1..21,24..32): note = RNA
  modified_base 21: mod_base = OTHER; note = 2-Prime-O-Methoxyethyl modified nucleoside
  modified_base 22: mod_base = OTHER; note = DNA nucleotide carrying a 6-amino-5-nitro-3-yl-2(1H)-pyridone nucleobase
  modified_base order(18,20,25): mod_base = OTHER; note = 2-Prime-Fluoro modified nucleoside
  modified_base order(1..17,19,24,26..32): mod_base = OTHER; note = 2-Prime-O-Methyl modified nucleoside
  modified_base order(1^2,31^32): mod_base = OTHER; note = (1,3-dimethylimidazolidin-2-ylidene) Phosphoramidate linkage
  modified_base order(2..23,24..31): mod_base = OTHER; note = Phosphorothioate linkage
  modified_base 23^24: mod_base = OTHER; note = Methylphosphonate linkage
  misc_feature 1..32: note = RM110397

SEQ ID NO: 606 - DNA, 32 bp, synthetic construct; identical to SEQ ID NO: 19
  source 1..32: mol_type = other DNA
  misc_feature 19..20: note = DNA
  misc_feature order(1..18,21..32): note = RNA
  modified_base 18: mod_base = OTHER; note = 2-Prime-O-Methoxyethyl modified nucleoside
  modified_base 19: mod_base = OTHER; note = DNA nucleotide carrying a 6-amino-5-nitro-3-yl-2(1H)-pyridone nucleobase
  modified_base order(15,17,22): mod_base = OTHER; note = 2-Prime-Fluoro modified nucleoside
  modified_base order(1..14,16,21,23..32): mod_base = OTHER; note = 2-Prime-O-Methyl modified nucleoside
  modified_base order(1^2,31^32): mod_base = OTHER; note = (1,3-dimethylimidazolidin-2-ylidene) Phosphoramidate linkage
  modified_base order(2..20,21..31): mod_base = OTHER; note = Phosphorothioate linkage
  modified_base 20^21: mod_base = OTHER; note = Methylphosphonate linkage
  misc_feature 1..32: note = RM110398

SEQ ID NO: 607 - DNA, 32 bp, synthetic construct; identical to SEQ ID NO: 131
  source 1..32: mol_type = other DNA
  misc_feature 16..17: note = DNA
  misc_feature order(1..15,18..32): note = RNA
  modified_base 15: mod_base = OTHER; note = 2-Prime-O-Methoxyethyl modified nucleoside
  modified_base 16: mod_base = OTHER; note = DNA nucleotide carrying a 6-amino-5-nitro-3-yl-2(1H)-pyridone nucleobase
  modified_base order(12,14,19): mod_base = OTHER; note = 2-Prime-Fluoro modified nucleoside
  modified_base order(1..11,13,18,20..32): mod_base = OTHER; note = 2-Prime-O-Methyl modified nucleoside
  modified_base order(1^2,31^32): mod_base = OTHER; note = (1,3-dimethylimidazolidin-2-ylidene) Phosphoramidate linkage
  modified_base order(2..17,18..31): mod_base = OTHER; note = Phosphorothioate linkage
  modified_base 17^18: mod_base = OTHER; note = Methylphosphonate linkage
  misc_feature 1..32: note = RM110399

SEQ ID NO: 608 - DNA, 32 bp, synthetic construct; identical to SEQ ID NO: 132
  source 1..32: mol_type = other DNA
  misc_feature 13..14: note = DNA
  misc_feature order(1..12,15..32): note = RNA
  modified_base 12: mod_base = OTHER; note = 2-Prime-O-Methoxyethyl modified nucleoside
  modified_base 13: mod_base = OTHER; note = DNA nucleotide carrying a 6-amino-5-nitro-3-yl-2(1H)-pyridone nucleobase
  modified_base order(9,11,16): mod_base = OTHER; note = 2-Prime-Fluoro modified nucleoside
  modified_base order(1..8,10,15,17..32): mod_base = OTHER; note = 2-Prime-O-Methyl modified nucleoside
  modified_base order(1^2,31^32): mod_base = OTHER; note = (1,3-dimethylimidazolidin-2-ylidene) Phosphoramidate linkage
  modified_base order(2..14,15..31): mod_base = OTHER; note = Phosphorothioate linkage
  modified_base 14^15: mod_base = OTHER; note = Methylphosphonate linkage
  misc_feature 1..32: note = RM110400

SEQ ID NO: 609 - DNA, 32 bp, synthetic construct; identical to SEQ ID NO: 133
  source 1..32: mol_type = other DNA
  misc_feature 10..11: note = DNA
  misc_feature order(1..9,12..32): note = RNA
  modified_base 9: mod_base = OTHER; note = 2-Prime-O-Methoxyethyl modified nucleoside
  modified_base 10: mod_base = OTHER; note = DNA nucleotide carrying a 6-amino-5-nitro-3-yl-2(1H)-pyridone nucleobase
  modified_base order(6,8,13): mod_base = OTHER; note = 2-Prime-Fluoro modified nucleoside
  modified_base order(1..5,7,12,14..32): mod_base = OTHER; note = 2-Prime-O-Methyl modified nucleoside
  modified_base order(1^2,31^32): mod_base = OTHER; note = (1,3-dimethylimidazolidin-2-ylidene) Phosphoramidate linkage
  modified_base order(2..11,12..31): mod_base = OTHER; note = Phosphorothioate linkage
  modified_base 11^12: mod_base = OTHER; note = Methylphosphonate linkage
  misc_feature 1..32: note = RM110401

SEQ ID NO: 610 - DNA, 32 bp, synthetic construct; identical to SEQ ID NO: 134
  source 1..32: mol_type = other DNA
  misc_feature 7..8: note = DNA
  misc_feature order(1..6,9..32): note = RNA
  modified_base 6: mod_base = OTHER; note = 2-Prime-O-Methoxyethyl modified nucleoside
  modified_base 7: mod_base = OTHER; note = DNA nucleotide carrying a 6-amino-5-nitro-3-yl-2(1H)-pyridone nucleobase
  modified_base order(3,5,10): mod_base = OTHER; note = 2-Prime-Fluoro modified nucleoside
  modified_base order(1..2,4,9,11..32): mod_base = OTHER; note = 2-Prime-O-Methyl modified nucleoside
  modified_base order(1^2,31^32): mod_base = OTHER; note = (1,3-dimethylimidazolidin-2-ylidene) Phosphoramidate linkage
  modified_base order(2..8,9..31): mod_base = OTHER; note = Phosphorothioate linkage
  modified_base 8^9: mod_base = OTHER; note = Methylphosphonate linkage
  misc_feature 1..32: note = RM110402

SEQ ID NO: 611 - DNA, 23 bp, synthetic construct
  source 1..23: mol_type = other DNA
  misc_feature 18..19: note = DNA
  misc_feature order(1..17,20..23): note = RNA
  modified_base 17: mod_base = OTHER; note = 2-Prime-O-Methoxyethyl modified nucleoside
  modified_base 18: mod_base = OTHER; note = DNA nucleotide carrying a 6-amino-5-nitro-3-yl-2(1H)-pyridone nucleobase
  modified_base order(6,11..12,14,21,23): mod_base = OTHER; note = 2-Prime-Fluoro modified nucleoside
  modified_base order(1..5,7..10,13,15..16,20,22): mod_base = OTHER; note = 2-Prime-O-Methyl modified nucleoside
  modified_base order(1^2,22^23): mod_base = OTHER; note = (1,3-dimethylimidazolidin-2-ylidene) Phosphoramidate linkage
  modified_base order(2..19,20..22): mod_base = OTHER; note = Phosphorothioate linkage
  modified_base 19^20: mod_base = OTHER; note = Methylphosphonate linkage
  misc_feature 1..23: note = RM110403
ggtcaaacctctgaggantgggt

SEQ ID NO: 612 - DNA, 23 bp, synthetic construct
  source 1..23: mol_type = other DNA
  misc_feature 15..16: note = DNA
  misc_feature order(1..14,17..23): note = RNA
  modified_base 14: mod_base = OTHER; note = 2-Prime-O-Methoxyethyl modified nucleoside
  modified_base 15: mod_base = OTHER; note = DNA nucleotide carrying a 6-amino-5-nitro-3-yl-2(1H)-pyridone nucleobase
  modified_base order(3,8..9,11,18,20): mod_base = OTHER; note = 2-Prime-Fluoro modified nucleoside
  modified_base order(1..2,4..7,10,12..13,17,19,21..23): mod_base = OTHER; note = 2-Prime-O-Methyl modified nucleoside
  modified_base order(1^2,22^23): mod_base = OTHER; note = (1,3-dimethylimidazolidin-2-ylidene) Phosphoramidate linkage
  modified_base order(2..16,17..22): mod_base = OTHER; note = Phosphorothioate linkage
  modified_base 16^17: mod_base = OTHER; note = Methylphosphonate linkage
  misc_feature 1..23: note = RM110404
caaacctctgaggantgggttca

SEQ ID NO: 613 - DNA, 32 bp, synthetic construct; identical to SEQ ID NO: 128
  source 1..32: mol_type = other DNA
  misc_feature 25..26: note = DNA
  misc_feature order(1..24,27..32): note = RNA
  modified_base 24: mod_base = OTHER; note = 2-Prime-O-Methoxyethyl modified nucleoside
  modified_base 25: mod_base = OTHER; note = DNA nucleotide carrying a 6-amino-5-nitro-3-yl-2(1H)-pyridone nucleobase
  modified_base order(13,18..19,21,28,30): mod_base = OTHER; note = 2-Prime-Fluoro modified nucleoside
  modified_base order(1..12,14..17,20,22..23,27,29,31..32): mod_base = OTHER; note = 2-Prime-O-Methyl modified nucleoside
  modified_base order(1^2,31^32): mod_base = OTHER; note = (1,3-dimethylimidazolidin-2-ylidene) Phosphoramidate linkage
  modified_base order(2..26,27..31): mod_base = OTHER; note = Phosphorothioate linkage
  modified_base 26^27: mod_base = OTHER; note = Methylphosphonate linkage
  misc_feature 1..32: note = RM110405

SEQ ID NO: 614 - DNA, 32 bp, synthetic construct; identical to SEQ ID NO: 129
  source 1..32: mol_type = other DNA
  misc_feature 22..23: note = DNA
  misc_feature order(1..21,24..32): note = RNA
  modified_base 21: mod_base = OTHER; note = 2-Prime-O-Methoxyethyl modified nucleoside
  modified_base 22: mod_base = OTHER; note = DNA nucleotide carrying a 6-amino-5-nitro-3-yl-2(1H)-pyridone nucleobase
  modified_base order(10,15..16,18,25,27): mod_base = OTHER; note = 2-Prime-Fluoro modified nucleoside
  modified_base order(1..9,11..14,17,19..20,24,26,28..32): mod_base = OTHER; note = 2-Prime-O-Methyl modified nucleoside
  modified_base order(1^2,31^32): mod_base = OTHER; note = (1,3-dimethylimidazolidin-2-ylidene) Phosphoramidate linkage
  modified_base order(2..23,24..31): mod_base = OTHER; note = Phosphorothioate linkage
  modified_base 23^24: mod_base = OTHER; note = Methylphosphonate linkage
  misc_feature 1..32: note = RM110406

SEQ ID NO: 615 - DNA, 32 bp, synthetic construct; identical to SEQ ID NO: 19
  source 1..32: mol_type = other DNA
  misc_feature 19..20: note = DNA
  misc_feature order(1..18,21..32): note = RNA
  modified_base 18: mod_base = OTHER; note = 2-Prime-O-Methoxyethyl modified nucleoside
  modified_base 19: mod_base = OTHER; note = DNA nucleotide carrying a 6-amino-5-nitro-3-yl-2(1H)-pyridone nucleobase
  modified_base order(7,12..13,15,22,24): mod_base = OTHER; note = 2-Prime-Fluoro modified nucleoside
  modified_base order(1..6,8..11,14,16..17,21,23,25..32): mod_base = OTHER; note = 2-Prime-O-Methyl modified nucleoside
  modified_base order(1^2,31^32): mod_base = OTHER; note = (1,3-dimethylimidazolidin-2-ylidene) Phosphoramidate linkage
  modified_base order(2..20,21..31): mod_base = OTHER; note = Phosphorothioate linkage
  modified_base 20^21: mod_base = OTHER; note = Methylphosphonate linkage
  misc_feature 1..32: note = RM110407

SEQ ID NO: 616 - DNA, 32 bp, synthetic construct; identical to SEQ ID NO: 131
  source 1..32: mol_type = other DNA
  misc_feature 16..17: note = DNA
  misc_feature order(1..15,18..32): note = RNA
  modified_base 15: mod_base = OTHER; note = 2-Prime-O-Methoxyethyl modified nucleoside
  modified_base 16: mod_base = OTHER; note = DNA nucleotide carrying a 6-amino-5-nitro-3-yl-2(1H)-pyridone nucleobase
  modified_base order(4,9..10,12,19,21): mod_base = OTHER; note = 2-Prime-Fluoro modified nucleoside
  modified_base order(1..3,5..8,11,13..14,18,20,22..32): mod_base = OTHER; note = 2-Prime-O-Methyl modified nucleoside
  modified_base order(1^2,31^32): mod_base = OTHER; note = (1,3-dimethylimidazolidin-2-ylidene) Phosphoramidate linkage
  modified_base order(2..17,18..31): mod_base = OTHER; note = Phosphorothioate linkage
  modified_base 17^18: mod_base = OTHER; note = Methylphosphonate linkage
  misc_feature 1..32: note = RM110408

SEQ ID NO: 617 - DNA, 32 bp, synthetic construct; identical to SEQ ID NO: 132
  source 1..32: mol_type = other DNA
  misc_feature 13..14: note = DNA
  misc_feature order(1..12,15..32): note = RNA
  modified_base 12: mod_base = OTHER; note = 2-Prime-O-Methoxyethyl modified nucleoside
  modified_base 13: mod_base = OTHER; note = DNA nucleotide carrying a 6-amino-5-nitro-3-yl-2(1H)-pyridone nucleobase
  modified_base order(1,6..7,9,16,18): mod_base = OTHER; note = 2-Prime-Fluoro modified nucleoside
  modified_base order(2..5,8,10..11,15,17,19..32): mod_base = OTHER; note = 2-Prime-O-Methyl modified nucleoside
  modified_base order(1^2,31^32): mod_base = OTHER; note = (1,3-dimethylimidazolidin-2-ylidene) Phosphoramidate linkage
  modified_base order(2..14,15..31): mod_base = OTHER; note = Phosphorothioate linkage
  modified_base 14^15: mod_base = OTHER; note = Methylphosphonate linkage
  misc_feature 1..32: note = RM110409

SEQ ID NO: 618 - DNA, 23 bp, synthetic construct
  source 1..23: mol_type = other DNA
  misc_feature 9..10: note = DNA
  misc_feature order(1..8,11..23): note = RNA
  modified_base 8: mod_base = OTHER; note = 2-Prime-O-Methoxyethyl modified nucleoside
  modified_base 9: mod_base = OTHER; note = DNA nucleotide carrying a 6-amino-5-nitro-3-yl-2(1H)-pyridone nucleobase
  modified_base order(6,12,15,17..18,23): mod_base = OTHER; note = 2-Prime-Fluoro modified nucleoside
  modified_base order(1..5,7,11,13..14,16,19..22): mod_base = OTHER; note = 2-Prime-O-Methyl modified nucleoside
  modified_base order(1^2,22^23): mod_base = OTHER; note = (1,3-dimethylimidazolidin-2-ylidene) Phosphoramidate linkage
  modified_base order(2..10,11..22): mod_base = OTHER; note = Phosphorothioate linkage
  modified_base 10^11: mod_base = OTHER; note = Methylphosphonate linkage
  misc_feature 1..23: note = RM110410
tctgaggantgggttcatttttc

SEQ ID NO: 619 - DNA, 23 bp, synthetic construct
  source 1..23: mol_type = other DNA
  misc_feature 6..7: note = DNA
  misc_feature order(1..5,8..23): note = RNA
  modified_base 5: mod_base = OTHER; note = 2-Prime-O-Methoxyethyl modified nucleoside
  modified_base 6: mod_base = OTHER; note = DNA nucleotide carrying a 6-amino-5-nitro-3-yl-2(1H)-pyridone nucleobase
  modified_base order(3,9,12,14..15,20): mod_base = OTHER; note = 2-Prime-Fluoro modified nucleoside
  modified_base order(1..2,4,8,10..11,13,16..19,21..23): mod_base = OTHER; note = 2-Prime-O-Methyl modified nucleoside
  modified_base order(1^2,22^23): mod_base = OTHER; note = (1,3-dimethylimidazolidin-2-ylidene) Phosphoramidate linkage
  modified_base order(2..7,8..22): mod_base = OTHER; note = Phosphorothioate linkage
  modified_base 7^8: mod_base = OTHER; note = Methylphosphonate linkage
  misc_feature 1..23: note = RM110411
gaggantgggttcatttttcttg

SEQ ID NO: 620 - DNA, 32 bp, synthetic construct; identical to SEQ ID NO: 131
  source 1..32: mol_type = other DNA
  misc_feature 16..17: note = DNA
  misc_feature order(1..15,18..32): note = RNA
  modified_base 15: mod_base = OTHER; note = 2-Prime-O-Methoxyethyl modified nucleoside
  modified_base 16: mod_base = OTHER; note = DNA nucleotide carrying a 6-amino-5-nitro-3-yl-2(1H)-pyridone nucleobase
  modified_base order(13,19,22,24..25,30): mod_base = OTHER; note = 2-Prime-Fluoro modified nucleoside
  modified_base order(1..12,14,18,20..21,23,26..29,31..32): mod_base = OTHER; note = 2-Prime-O-Methyl modified nucleoside
  modified_base order(1^2,31^32): mod_base = OTHER; note = (1,3-dimethylimidazolidin-2-ylidene) Phosphoramidate linkage
  modified_base order(2..17,18..31): mod_base = OTHER; note = Phosphorothioate linkage
  modified_base 17^18: mod_base = OTHER; note = Methylphosphonate linkage
  misc_feature 1..32: note = RM110412

SEQ ID NO: 621 - DNA, 32 bp, synthetic construct; identical to SEQ ID NO: 132
  source 1..32: mol_type = other DNA
  misc_feature 13..14: note = DNA
  misc_feature order(1..12,15..32): note = RNA
  modified_base 12: mod_base = OTHER; note = 2-Prime-O-Methoxyethyl modified nucleoside
  modified_base 13: mod_base = OTHER; note = DNA nucleotide carrying a 6-amino-5-nitro-3-yl-2(1H)-pyridone nucleobase
  modified_base order(10,16,19,21..22,27): mod_base = OTHER; note = 2-Prime-Fluoro modified nucleoside
  modified_base order(1..9,11,15,17..18,20,23..26,28..32): mod_base = OTHER; note = 2-Prime-O-Methyl modified nucleoside
  modified_base order(1^2,31^32): mod_base = OTHER; note = (1,3-dimethylimidazolidin-2-ylidene) Phosphoramidate linkage
  modified_base order(2..14,15..31): mod_base = OTHER; note = Phosphorothioate linkage
  modified_base 14^15: mod_base = OTHER; note = Methylphosphonate linkage
  misc_feature 1..32: note = RM110413

SEQ ID NO: 622 - DNA, 32 bp, synthetic construct; identical to SEQ ID NO: 133
  source 1..32: mol_type = other DNA
  misc_feature 10..11: note = DNA
  misc_feature order(1..9,12..32): note = RNA
  modified_base 9: mod_base = OTHER; note = 2-Prime-O-Methoxyethyl modified nucleoside
  modified_base 10: mod_base = OTHER; note = DNA nucleotide carrying a 6-amino-5-nitro-3-yl-2(1H)-pyridone nucleobase
  modified_base order(7,13,16,18..19,24): mod_base = OTHER; note = 2-Prime-Fluoro modified nucleoside
  modified_base order(1..6,8,12,14..15,17,20..23,25..32): mod_base = OTHER; note = 2-Prime-O-Methyl modified nucleoside
  modified_base order(1^2,31^32): mod_base = OTHER; note = (1,3-dimethylimidazolidin-2-ylidene) Phosphoramidate linkage
  modified_base order(2..11,12..31): mod_base = OTHER; note = Phosphorothioate linkage
  modified_base 11^12: mod_base = OTHER; note = Methylphosphonate linkage
  misc_feature 1..32: note = RM110414

SEQ ID NO: 623 - DNA, 32 bp, synthetic construct; identical to SEQ ID NO: 134
  source 1..32: mol_type = other DNA
  misc_feature 7..8: note = DNA
  misc_feature order(1..6,9..32): note = RNA
  modified_base 6: mod_base = OTHER; note = 2-Prime-O-Methoxyethyl modified nucleoside
  modified_base 7: mod_base = OTHER; note = DNA nucleotide carrying a 6-amino-5-nitro-3-yl-2(1H)-pyridone nucleobase
  modified_base order(4,10,13,15..16,21): mod_base = OTHER; note = 2-Prime-Fluoro modified nucleoside
  modified_base order(1..3,5,9,11..12,14,17..20,22..32): mod_base = OTHER; note = 2-Prime-O-Methyl modified nucleoside
  modified_base order(1^2,31^32): mod_base = OTHER; note = (1,3-dimethylimidazolidin-2-ylidene) Phosphoramidate linkage
  modified_base order(2..8,9..31): mod_base = OTHER; note = Phosphorothioate linkage
  modified_base 8^9: mod_base = OTHER; note = Methylphosphonate linkage
  misc_feature 1..32: note = RM110415

SEQ ID NO: 624 - DNA, 23 bp, synthetic construct
  source 1..23: mol_type = other DNA
  misc_feature 18..19: note = DNA
  misc_feature order(1..17,20..23): note = RNA
  modified_base 17: mod_base = OTHER; note = 2-Prime-O-Methoxyethyl modified nucleoside
  modified_base 18: mod_base = OTHER; note = DNA nucleotide carrying a 6-amino-5-nitro-3-yl-2(1H)-pyridone nucleobase
  modified_base order(12,14,21,23): mod_base = OTHER; note = 2-Prime-Fluoro modified nucleoside
  modified_base order(1..11,13,15..16,20,22): mod_base = OTHER; note = 2-Prime-O-Methyl modified nucleoside
  modified_base order(1^2,22^23): mod_base = OTHER; note = (1,3-dimethylimidazolidin-2-ylidene) Phosphoramidate linkage
  modified_base order(2..19,20..22): mod_base = OTHER; note = Phosphorothioate linkage
  modified_base 19^20: mod_base = OTHER; note = Methylphosphonate linkage
  misc_feature 1..23: note = RM110416
ggtcaaacctctgaggantgggt

SEQ ID NO: 625 - DNA, 23 bp, synthetic construct
  source 1..23: mol_type = other DNA
  misc_feature 15..16: note = DNA
  misc_feature order(1..14,17..23): note = RNA
  modified_base 14: mod_base = OTHER; note = 2-Prime-O-Methoxyethyl modified nucleoside
  modified_base 15: mod_base = OTHER; note = DNA nucleotide carrying a 6-amino-5-nitro-3-yl-2(1H)-pyridone nucleobase
  modified_base order(9,11,18,20): mod_base = OTHER; note = 2-Prime-Fluoro modified nucleoside
  modified_base order(1..8,10,12..13,17,19,21..23): mod_base = OTHER; note = 2-Prime-O-Methyl modified nucleoside
  modified_base order(1^2,22^23): mod_base = OTHER; note = (1,3-dimethylimidazolidin-2-ylidene) Phosphoramidate linkage
  modified_base order(2..16,17..22): mod_base = OTHER; note = Phosphorothioate linkage
  modified_base 16^17: mod_base = OTHER; note = Methylphosphonate linkage
  misc_feature 1..23: note = RM110417
caaacctctgaggantgggttca

SEQ ID NO: 626 - DNA, 23 bp, synthetic construct
  source 1..23: mol_type = other DNA
  misc_feature 12..13: note = DNA
  misc_feature order(1..11,14..23): note = RNA
  modified_base 11: mod_base = OTHER; note = 2-Prime-O-Methoxyethyl modified nucleoside
  modified_base 12: mod_base = OTHER; note = DNA nucleotide carrying a 6-amino-5-nitro-3-yl-2(1H)-pyridone nucleobase
  modified_base order(6,8,15,17): mod_base = OTHER; note = 2-Prime-Fluoro modified nucleoside
  modified_base order(1..5,7,9..10,14,16,18..23): mod_base = OTHER; note = 2-Prime-O-Methyl modified nucleoside
  modified_base order(1^2,22^23): mod_base = OTHER; note = (1,3-dimethylimidazolidin-2-ylidene) Phosphoramidate linkage
  modified_base order(2..13,14..22): mod_base = OTHER; note = Phosphorothioate linkage
  modified_base 13^14: mod_base = OTHER; note = Methylphosphonate linkage
  misc_feature 1..23: note = RM110418
acctctgaggantgggttcattt

SEQ ID NO: 627 - DNA, 23 bp, synthetic construct
  source 1..23: mol_type = other DNA
  misc_feature 9..10: note = DNA
  misc_feature order(1..8,11..23): note = RNA
  modified_base 8: mod_base = OTHER; note = 2-Prime-O-Methoxyethyl modified nucleoside
  modified_base 9: mod_base = OTHER; note = DNA nucleotide carrying a 6-amino-5-nitro-3-yl-2(1H)-pyridone nucleobase
  modified_base order(3,5,12,14): mod_base = OTHER; note = 2-Prime-Fluoro modified nucleoside
  modified_base order(1..2,4,6..7,11,13,15..23): mod_base = OTHER; note = 2-Prime-O-Methyl modified nucleoside
  modified_base order(1^2,22^23): mod_base = OTHER; note = (1,3-dimethylimidazolidin-2-ylidene) Phosphoramidate linkage
  modified_base order(2..10,11..22): mod_base = OTHER; note = Phosphorothioate linkage
  modified_base 10^11: mod_base = OTHER; note = Methylphosphonate linkage
  misc_feature 1..23: note = RM110419
tctgaggantgggttcatttttc

SEQ ID NO: 628 - DNA, 23 bp, synthetic construct
  source 1..23: mol_type = other DNA
  misc_feature 15..16: note = DNA
  misc_feature order(1..14,17..23): note = RNA
  modified_base 14: mod_base = OTHER; note = 2-Prime-O-Methoxyethyl modified nucleoside
  modified_base 15: mod_base = OTHER; note = DNA nucleotide carrying a 6-amino-5-nitro-3-yl-2(1H)-pyridone nucleobase
  modified_base order(12,18,21,23): mod_base = OTHER; note = 2-Prime-Fluoro modified nucleoside
  modified_base order(1..11,13,17,19..20,22): mod_base = OTHER; note = 2-Prime-O-Methyl modified nucleoside
  modified_base order(1^2,22^23): mod_base = OTHER; note = (1,3-dimethylimidazolidin-2-ylidene) Phosphoramidate linkage
  modified_base order(2..16,17..22): mod_base = OTHER; note = Phosphorothioate linkage
  modified_base 16^17: mod_base = OTHER; note = Methylphosphonate linkage
  misc_feature 1..23: note = RM110420
caaacctctgaggantgggttca

SEQ ID NO: 629 - DNA, 23 bp, synthetic construct
  source 1..23: mol_type = other DNA
  misc_feature 12..13: note = DNA
  misc_feature order(1..11,14..23): note = RNA
  modified_base 11: mod_base = OTHER; note = 2-Prime-O-Methoxyethyl modified nucleoside
  modified_base 12: mod_base = OTHER; note = DNA nucleotide carrying a 6-amino-5-nitro-3-yl-2(1H)-pyridone nucleobase
  modified_base order(9,15,18,20): mod_base = OTHER; note = 2-Prime-Fluoro modified nucleoside
  modified_base order(1..8,10,14,16..17,19,21..23): mod_base = OTHER; note = 2-Prime-O-Methyl modified nucleoside
  modified_base order(1^2,22^23): mod_base = OTHER; note = (1,3-dimethylimidazolidin-2-ylidene) Phosphoramidate linkage
  modified_base order(2..13,14..22): mod_base = OTHER; note = Phosphorothioate linkage
  modified_base 13^14: mod_base = OTHER; note = Methylphosphonate linkage
  misc_feature 1..23: note = RM110421
acctctgaggantgggttcattt

SEQ ID NO: 630 - DNA, 23 bp, synthetic construct
  source 1..23: mol_type = other DNA
  misc_feature 9..10: note = DNA
  misc_feature order(1..8,11..23): note = RNA
  modified_base 8: mod_base = OTHER; note = 2-Prime-O-Methoxyethyl modified nucleoside
  modified_base 9: mod_base = OTHER; note = DNA nucleotide carrying a 6-amino-5-nitro-3-yl-2(1H)-pyridone nucleobase
  modified_base order(6,12,15,17): mod_base = OTHER; note = 2-Prime-Fluoro modified nucleoside
  modified_base order(1..5,7,11,13..14,16,18..23): mod_base = OTHER; note = 2-Prime-O-Methyl modified nucleoside
  modified_base order(1^2,22^23): mod_base = OTHER; note = (1,3-dimethylimidazolidin-2-ylidene) Phosphoramidate linkage
  modified_base order(2..10,11..22): mod_base = OTHER; note = Phosphorothioate linkage
  modified_base 10^11: mod_base = OTHER; note = Methylphosphonate linkage
  misc_feature 1..23: note = RM110422
tctgaggantgggttcatttttc

SEQ ID NO: 631 - DNA, 23 bp, synthetic construct
  source 1..23: mol_type = other DNA
  misc_feature 6..7: note = DNA
  misc_feature order(1..5,8..23): note = RNA
  modified_base 5: mod_base = OTHER; note = 2-Prime-O-Methoxyethyl modified nucleoside
  modified_base 6: mod_base = OTHER; note = DNA nucleotide carrying a 6-amino-5-nitro-3-yl-2(1H)-pyridone nucleobase
  modified_base order(3,9,12,14): mod_base = OTHER; note = 2-Prime-Fluoro modified nucleoside
  modified_base order(1..2,4,8,10..11,13,15..23): mod_base = OTHER; note = 2-Prime-O-Methyl modified nucleoside
  modified_base order(1^2,22^23): mod_base = OTHER; note = (1,3-dimethylimidazolidin-2-ylidene) Phosphoramidate linkage
  modified_base order(2..7,8..22): mod_base = OTHER; note = Phosphorothioate linkage
  modified_base 7^8: mod_base = OTHER; note = Methylphosphonate linkage
  misc_feature 1..23: note = RM110423
gaggantgggttcatttttcttg

SEQ ID NO: 632 - DNA, 32 bp, synthetic construct; identical to SEQ ID NO: 134
  source 1..32: mol_type = other DNA
  misc_feature 7..8: note = DNA
  misc_feature order(1..6,9..32): note = RNA
  modified_base 6: mod_base = OTHER; note = 2-Prime-O-Methoxyethyl modified nucleoside
  modified_base 7: mod_base = OTHER; note = DNA nucleotide carrying a 6-amino-5-nitro-3-yl-2(1H)-pyridone nucleobase
  modified_base order(5,10,12,15..17,20,23,31): mod_base = OTHER; note = 2-Prime-Fluoro modified nucleoside
  modified_base order(1..4,9,11,13..14,18..19,21..22,24..30,32): mod_base = OTHER; note = 2-Prime-O-Methyl modified nucleoside
  modified_base order(1^2,31^32): mod_base = OTHER; note = (1,3-dimethylimidazolidin-2-ylidene) Phosphoramidate linkage
  modified_base order(2..8,9..31): mod_base = OTHER; note = Phosphorothioate linkage
  modified_base 8^9: mod_base = OTHER; note = Methylphosphonate linkage
  misc_feature 1..32: note = RM110424

SEQ ID NO: 633 - DNA, 32 bp, synthetic construct; identical to SEQ ID NO: 127
  source 1..32: mol_type = other DNA
  misc_feature 28..29: note = DNA
  misc_feature order(1..27,30..32): note = RNA
  modified_base 27: mod_base = OTHER; note = 2-Prime-O-Methoxyethyl modified nucleoside
  modified_base 28: mod_base = OTHER; note = DNA nucleotide carrying a 6-amino-5-nitro-3-yl-2(1H)-pyridone nucleobase
  modified_base order(6,14,17,20..22,25,31..32): mod_base = OTHER; note = 2-Prime-Fluoro modified nucleoside
  modified_base order(1..5,7..13,15..16,18..19,23..24,26,30): mod_base = OTHER; note = 2-Prime-O-Methyl modified nucleoside
  modified_base order(1^2,31^32): mod_base = OTHER; note = (1,3-dimethylimidazolidin-2-ylidene) Phosphoramidate linkage
  modified_base order(2..29,30^31): mod_base = OTHER; note = Phosphorothioate linkage
  modified_base 29^30: mod_base = OTHER; note = Methylphosphonate linkage
  misc_feature 1..32: note = RM110425

SEQ ID NO: 634 - DNA, 32 bp, synthetic construct; identical to SEQ ID NO: 128
  source 1..32: mol_type = other DNA
  misc_feature 25..26: note = DNA
  misc_feature order(1..24,27..32): note = RNA
  modified_base 24: mod_base = OTHER; note = 2-Prime-O-Methoxyethyl modified nucleoside
  modified_base 25: mod_base = OTHER; note = DNA nucleotide carrying a 6-amino-5-nitro-3-yl-2(1H)-pyridone nucleobase
  modified_base order(3,11,14,17..19,22,28..29): mod_base = OTHER; note = 2-Prime-Fluoro modified nucleoside
  modified_base order(1..2,4..10,12..13,15..16,20..21,23,27,30..32): mod_base = OTHER; note = 2-Prime-O-Methyl modified nucleoside
  modified_base order(1^2,31^32): mod_base = OTHER; note = (1,3-dimethylimidazolidin-2-ylidene) Phosphoramidate linkage
  modified_base order(2..26,27..31): mod_base = OTHER; note = Phosphorothioate linkage
  modified_base 26^27: mod_base = OTHER; note = Methylphosphonate linkage
  misc_feature 1..32: note = RM110426

SEQ ID NO: 635 - DNA, 23 bp, synthetic construct
  source 1..23: mol_type = other DNA
  misc_feature 12..13: note = DNA
  misc_feature order(1..11,14..23): note = RNA
  modified_base 11: mod_base = OTHER; note = 2-Prime-O-Methoxyethyl modified nucleoside
  modified_base 12: mod_base = OTHER; note = DNA nucleotide carrying a 6-amino-5-nitro-3-yl-2(1H)-pyridone nucleobase
  modified_base order(10,15,17,20..22): mod_base = OTHER; note = 2-Prime-Fluoro modified nucleoside
  modified_base order(1..9,14,16,18..19,23): mod_base = OTHER; note = 2-Prime-O-Methyl modified nucleoside
  modified_base order(1^2,22^23): mod_base = OTHER; note = (1,3-dimethylimidazolidin-2-ylidene) Phosphoramidate linkage
  modified_base order(2..13,14..22): mod_base = OTHER; note = Phosphorothioate linkage
  modified_base 13^14: mod_base = OTHER; note = Methylphosphonate linkage
  misc_feature 1..23: note = RM110427
acctctgaggantgggttcattt

SEQ ID NO: 636 - DNA, 23 bp, synthetic construct
  source 1..23: mol_type = other DNA
  misc_feature 9..10: note = DNA
  misc_feature order(1..8,11..23): note = RNA
  modified_base 8: mod_base = OTHER; note = 2-Prime-O-Methoxyethyl modified nucleoside
  modified_base 9: mod_base = OTHER; note = DNA nucleotide carrying a 6-amino-5-nitro-3-yl-2(1H)-pyridone nucleobase
  modified_base order(7,12,14,17..19): mod_base = OTHER; note = 2-Prime-Fluoro modified nucleoside
  modified_base order(1..6,11,13,15..16,20..23): mod_base = OTHER; note = 2-Prime-O-Methyl modified nucleoside
  modified_base order(1^2,22^23): mod_base = OTHER; note = (1,3-dimethylimidazolidin-2-ylidene) Phosphoramidate linkage
  modified_base order(2..10,11..22): mod_base = OTHER; note = Phosphorothioate linkage
  modified_base 10^11: mod_base = OTHER; note = Methylphosphonate linkage
  misc_feature 1..23: note = RM110428
tctgaggantgggttcatttttc

SEQ ID NO: 637 - DNA, 23 bp, synthetic construct
  source 1..23: mol_type = other DNA
  misc_feature 6..7: note = DNA
  misc_feature order(1..5,8..23): note = RNA
  modified_base 5: mod_base = OTHER; note = 2-Prime-O-Methoxyethyl modified nucleoside
  modified_base 6: mod_base = OTHER; note = DNA nucleotide carrying a 6-amino-5-nitro-3-yl-2(1H)-pyridone nucleobase
  modified_base order(4,9,11,14..16): mod_base = OTHER; note = 2-Prime-Fluoro modified nucleoside
  modified_base order(1..3,8,10,12..13,17..23): mod_base = OTHER; note = 2-Prime-O-Methyl modified nucleoside
  modified_base order(1^2,22^23): mod_base = OTHER; note = (1,3-dimethylimidazolidin-2-ylidene) Phosphoramidate linkage
  modified_base order(2..7,8..22): mod_base = OTHER; note = Phosphorothioate linkage
  modified_base 7^8: mod_base = OTHER; note = Methylphosphonate linkage
  misc_feature 1..23: note = RM110429
gaggantgggttcatttttcttg

SEQ ID NO: 638 - DNA, 32 bp, synthetic construct; identical to SEQ ID NO: 129
  source 1..32: mol_type = other DNA
  misc_feature 22..23: note = DNA
  misc_feature order(1..21,24..32): note = RNA
  modified_base 21: mod_base = OTHER; note = 2-Prime-O-Methoxyethyl modified nucleoside
  modified_base 22: mod_base = OTHER; note = DNA nucleotide carrying a 6-amino-5-nitro-3-yl-2(1H)-pyridone nucleobase
  modified_base order(20,25,27,30..32): mod_base = OTHER; note = 2-Prime-Fluoro modified nucleoside
  modified_base order(1..19,24,26,28..29): mod_base = OTHER; note = 2-Prime-O-Methyl modified nucleoside
  modified_base order(1^2,31^32): mod_base = OTHER; note = (1,3-dimethylimidazolidin-2-ylidene) Phosphoramidate linkage
  modified_base order(2..23,24..31): mod_base = OTHER; note = Phosphorothioate linkage
  modified_base 23^24: mod_base = OTHER; note = Methylphosphonate linkage
  misc_feature 1..32: note = RM110430

SEQ ID NO: 639 - DNA, 32 bp, synthetic construct; identical to SEQ ID NO: 19
  source 1..32: mol_type = other DNA
  misc_feature 19..20: note = DNA
  misc_feature order(1..18,21..32): note = RNA
  modified_base 18: mod_base = OTHER; note = 2-Prime-O-Methoxyethyl modified nucleoside
  modified_base 19: mod_base = OTHER; note = DNA nucleotide carrying a 6-amino-5-nitro-3-yl-2(1H)-pyridone nucleobase
  modified_base order(17,22,24,27..29): mod_base = OTHER; note = 2-Prime-Fluoro modified nucleoside
  modified_base order(1..16,21,23,25..26,30..32): mod_base = OTHER; note = 2-Prime-O-Methyl modified nucleoside
  modified_base order(1^2,31^32): mod_base = OTHER; note = (1,3-dimethylimidazolidin-2-ylidene) Phosphoramidate linkage
  modified_base order(2..20,21..31): mod_base = OTHER; note = Phosphorothioate linkage
  modified_base 20^21: mod_base = OTHER; note = Methylphosphonate linkage
  misc_feature 1..32: note = RM110431

SEQ ID NO: 640 - DNA, 32 bp, synthetic construct; identical to SEQ ID NO: 131
  source 1..32: mol_type = other DNA
  misc_feature 16..17: note = DNA
  misc_feature order(1..15,18..32): note = RNA
  modified_base 15: mod_base = OTHER; note = 2-Prime-O-Methoxyethyl modified nucleoside
  modified_base 16: mod_base = OTHER; note = DNA nucleotide carrying a 6-amino-5-nitro-3-yl-2(1H)-pyridone nucleobase
  modified_base order(14,19,21,24..26): mod_base = OTHER; note = 2-Prime-Fluoro modified nucleoside
  modified_base order(1..13,18,20,22..23,27..32): mod_base = OTHER; note = 2-Prime-O-Methyl modified nucleoside
  modified_base order(1^2,31^32): mod_base = OTHER; note = (1,3-dimethylimidazolidin-2-ylidene) Phosphoramidate linkage
  modified_base order(2..17,18..31): mod_base = OTHER; note = Phosphorothioate linkage
  modified_base 17^18: mod_base = OTHER; note = Methylphosphonate linkage
  misc_feature 1..32: note = RM110432

SEQ ID NO: 641 - DNA, 32 bp, synthetic construct; identical to SEQ ID NO: 132
  source 1..32: mol_type = other DNA
  misc_feature 13..14: note = DNA
  misc_feature order(1..12,15..32): note = RNA
  modified_base 12: mod_base = OTHER; note = 2-Prime-O-Methoxyethyl modified nucleoside
  modified_base 13: mod_base = OTHER; note = DNA nucleotide carrying a 6-amino-5-nitro-3-yl-2(1H)-pyridone nucleobase
  modified_base order(11,16,18,21..23): mod_base = OTHER; note = 2-Prime-Fluoro modified nucleoside
  modified_base order(1..10,15,17,19..20,24..32): mod_base = OTHER; note = 2-Prime-O-Methyl modified nucleoside
  modified_base order(1^2,31^32): mod_base = OTHER; note = (1,3-dimethylimidazolidin-2-ylidene) Phosphoramidate linkage
  modified_base order(2..14,15..31): mod_base = OTHER; note = Phosphorothioate linkage
  modified_base 14^15: mod_base = OTHER; note = Methylphosphonate linkage
  misc_feature 1..32: note = RM110433

SEQ ID NO: 642 - DNA, 32 bp, synthetic construct; identical to SEQ ID NO: 133
  source 1..32: mol_type = other DNA
  misc_feature 10..11: note = DNA
  misc_feature order(1..9,12..32): note = RNA
  modified_base 9: mod_base = OTHER; note = 2-Prime-O-Methoxyethyl modified nucleoside
  modified_base 10: mod_base = OTHER; note = DNA nucleotide carrying a 6-amino-5-nitro-3-yl-2(1H)-pyridone nucleobase
  modified_base order(8,13,15,18..20): mod_base = OTHER; note = 2-Prime-Fluoro modified nucleoside
  modified_base order(1..7,12,14,16..17,21..32): mod_base = OTHER; note = 2-Prime-O-Methyl modified nucleoside
  modified_base order(1^2,31^32): mod_base = OTHER; note = (1,3-dimethylimidazolidin-2-ylidene) Phosphoramidate linkage
  modified_base order(2..11,12..31): mod_base = OTHER; note = Phosphorothioate linkage
  modified_base 11^12: mod_base = OTHER; note = Methylphosphonate linkage
  misc_feature 1..32: note = RM110434

SEQ ID NO: 643 - DNA, 32 bp, synthetic construct; identical to SEQ ID NO: 134
  source 1..32: mol_type = other DNA
  misc_feature 7..8: note = DNA
  misc_feature order(1..6,9..32): note = RNA
  modified_base 6: mod_base = OTHER; note = 2-Prime-O-Methoxyethyl modified nucleoside
  modified_base 7: mod_base = OTHER; note = DNA nucleotide carrying a 6-amino-5-nitro-3-yl-2(1H)-pyridone nucleobase
  modified_base order(5,10,12,15..17): mod_base = OTHER; note = 2-Prime-Fluoro modified nucleoside
  modified_base order(1..4,9,11,13..14,18..32): mod_base = OTHER; note = 2-Prime-O-Methyl modified nucleoside
  modified_base order(1^2,31^32): mod_base = OTHER; note = (1,3-dimethylimidazolidin-2-ylidene) Phosphoramidate linkage
  modified_base order(2..8,9..31): mod_base = OTHER; note = Phosphorothioate linkage
  modified_base 8^9: mod_base = OTHER; note = Methylphosphonate linkage
  misc_feature 1..32: note = RM110435

SEQ ID NO: 644 - DNA, 23 bp, synthetic construct
  source 1..23: mol_type = other DNA
  misc_feature 18..19: note = DNA
  misc_feature order(1..17,20..23): note = RNA
  modified_base 17: mod_base = OTHER; note = 2-Prime-O-Methoxyethyl modified nucleoside
  modified_base 18: mod_base = OTHER; note = DNA nucleotide carrying a 6-amino-5-nitro-3-yl-2(1H)-pyridone nucleobase
  modified_base order(10..12,15,21..22): mod_base = OTHER; note = 2-Prime-Fluoro modified nucleoside
  modified_base order(1..9,13..14,16,20,23): mod_base = OTHER; note = 2-Prime-O-Methyl modified nucleoside
  modified_base order(1^2,22^23): mod_base = OTHER; note = (1,3-dimethylimidazolidin-2-ylidene) Phosphoramidate linkage
  modified_base order(2..19,20..22): mod_base = OTHER; note = Phosphorothioate linkage
  modified_base 19^20: mod_base = OTHER; note = Methylphosphonate linkage
  misc_feature 1..23: note = RM110436
ggtcaaacctctgaggantgggt

SEQ ID NO: 645 - DNA, 23 bp, synthetic construct
  source 1..23: mol_type = other DNA
  misc_feature 15..16: note = DNA
  misc_feature order(1..14,17..23): note = RNA
  modified_base 14: mod_base = OTHER; note = 2-Prime-O-Methoxyethyl modified nucleoside
  modified_base 15: mod_base = OTHER; note = DNA nucleotide carrying a 6-amino-5-nitro-3-yl-2(1H)-pyridone nucleobase
  modified_base order(7..9,12,18..19): mod_base = OTHER; note = 2-Prime-Fluoro modified nucleoside
  modified_base order(1..6,10..11,13,17,20..23): mod_base = OTHER; note = 2-Prime-O-Methyl modified nucleoside
  modified_base order(1^2,22^23): mod_base = OTHER; note = (1,3-dimethylimidazolidin-2-ylidene) Phosphoramidate linkage
  modified_base order(2..16,17..22): mod_base = OTHER; note = Phosphorothioate linkage
  modified_base 16^17: mod_base = OTHER; note = Methylphosphonate linkage
  misc_feature 1..23: note = RM110437
caaacctctgaggantgggttca

SEQ ID NO: 646 - DNA, 23 bp, synthetic construct
  source 1..23: mol_type = other DNA
  misc_feature 12..13: note = DNA
  misc_feature order(1..11,14..23): note = RNA
  modified_base 11: mod_base = OTHER; note = 2-Prime-O-Methoxyethyl modified nucleoside
  modified_base 12: mod_base = OTHER; note = DNA nucleotide carrying a 6-amino-5-nitro-3-yl-2(1H)-pyridone nucleobase
  modified_base order(4..6,9,15..16): mod_base = OTHER; note = 2-Prime-Fluoro modified nucleoside
  modified_base order(1..3,7..8,10,14,17..23): mod_base = OTHER; note = 2-Prime-O-Methyl modified nucleoside
  modified_base order(1^2,22^23): mod_base = OTHER; note = (1,3-dimethylimidazolidin-2-ylidene) Phosphoramidate linkage
  modified_base order(2..13,14..22): mod_base = OTHER; note = Phosphorothioate linkage
  modified_base 13^14: mod_base = OTHER; note = Methylphosphonate linkage
  misc_feature 1..23: note = RM110438
acctctgaggantgggttcattt

SEQ ID NO: 647 - DNA, 23 bp, synthetic construct
  source 1..23: mol_type = other DNA
  misc_feature 9..10: note = DNA
  misc_feature order(1..8,11..23): note = RNA
  modified_base 8: mod_base = OTHER; note = 2-Prime-O-Methoxyethyl modified nucleoside
  modified_base 9: mod_base = OTHER; note = DNA nucleotide carrying a 6-amino-5-nitro-3-yl-2(1H)-pyridone nucleobase
  modified_base order(1..3,6,12..13): mod_base = OTHER; note = 2-Prime-Fluoro modified nucleoside
  modified_base order(4..5,7,11,14..23): mod_base = OTHER; note = 2-Prime-O-Methyl modified nucleoside
  modified_base order(1^2,22^23): mod_base = OTHER; note = (1,3-dimethylimidazolidin-2-ylidene) Phosphoramidate linkage
  modified_base order(2..10,11..22): mod_base = OTHER; note = Phosphorothioate linkage
  modified_base 10^11: mod_base = OTHER; note = Methylphosphonate linkage
  misc_feature 1..23: note = RM110439
tctgaggantgggttcatttttc

SEQ ID NO: 648 - DNA, 32 bp, synthetic construct; identical to SEQ ID NO: 127
  source 1..32: mol_type = other DNA
  misc_feature 28..29: note = DNA
  misc_feature order(1..27,30..32): note = RNA
  modified_base 27: mod_base = OTHER; note = 2-Prime-O-Methoxyethyl modified nucleoside
  modified_base 28: mod_base = OTHER; note = DNA nucleotide carrying a 6-amino-5-nitro-3-yl-2(1H)-pyridone nucleobase
  modified_base order(20..22,25,31..32): mod_base = OTHER; note = 2-Prime-Fluoro modified nucleoside
  modified_base order(1..19,23..24,26,30): mod_base = OTHER; note = 2-Prime-O-Methyl modified nucleoside
  modified_base order(1^2,31^32): mod_base = OTHER; note = (1,3-dimethylimidazolidin-2-ylidene) Phosphoramidate linkage
  modified_base order(2..29,30^31): mod_base = OTHER; note = Phosphorothioate linkage
  modified_base 29^30: mod_base = OTHER; note = Methylphosphonate linkage
  misc_feature 1..32: note = RM110440

SEQ ID NO: 649 - DNA, 32 bp, synthetic construct; identical to SEQ ID NO: 128
  source 1..32: mol_type = other DNA
  misc_feature 25..26: note = DNA
  misc_feature order(1..24,27..32): note = RNA
  modified_base 24: mod_base = OTHER; note = 2-Prime-O-Methoxyethyl modified nucleoside
  modified_base 25: mod_base = OTHER; note = DNA nucleotide carrying a 6-amino-5-nitro-3-yl-2(1H)-pyridone nucleobase
  modified_base order(17..19,22,28..29): mod_base = OTHER; note = 2-Prime-Fluoro modified nucleoside
  modified_base order(1..16,20..21,23,27,30..32): mod_base = OTHER; note = 2-Prime-O-Methyl modified nucleoside
  modified_base order(1^2,31^32): mod_base = OTHER; note = (1,3-dimethylimidazolidin-2-ylidene) Phosphoramidate linkage
  modified_base order(2..26,27..31): mod_base = OTHER; note = Phosphorothioate linkage
  modified_base 26^27: mod_base = OTHER; note = Methylphosphonate linkage
  misc_feature 1..32: note = RM110441

SEQ ID NO: 650 - DNA, 32 bp, synthetic construct; identical to SEQ ID NO: 129
  source 1..32: mol_type = other DNA
  misc_feature 22..23: note = DNA
  misc_feature order(1..21,24..32): note = RNA
  modified_base 21: mod_base = OTHER; note = 2-Prime-O-Methoxyethyl modified nucleoside
  modified_base 22: mod_base = OTHER; note = DNA nucleotide carrying a 6-amino-5-nitro-3-yl-2(1H)-pyridone nucleobase
  modified_base order(14..16,19,25..26): mod_base = OTHER; note = 2-Prime-Fluoro modified nucleoside
  modified_base order(1..13,17..18,20,24,27..32): mod_base = OTHER; note = 2-Prime-O-Methyl modified nucleoside
  modified_base order(1^2,31^32): mod_base = OTHER; note = (1,3-dimethylimidazolidin-2-ylidene) Phosphoramidate linkage
  modified_base order(2..23,24..31): mod_base = OTHER; note = Phosphorothioate linkage
  modified_base 23^24: mod_base = OTHER; note = Methylphosphonate linkage
  misc_feature 1..32: note = RM110442

SEQ ID NO: 651 - DNA, 32 bp, synthetic construct; identical to SEQ ID NO: 19
  source 1..32: mol_type = other DNA
  misc_feature 19..20: note = DNA
  misc_feature order(1..18,21..32): note = RNA
  modified_base 18: mod_base = OTHER; note = 2-Prime-O-Methoxyethyl modified nucleoside
  modified_base 19: mod_base = OTHER; note = DNA nucleotide carrying a 6-amino-5-nitro-3-yl-2(1H)-pyridone nucleobase
  modified_base order(11..13,16,22..23): mod_base = OTHER; note = 2-Prime-Fluoro modified nucleoside
  modified_base order(1..10,14..15,17,21,24..32): mod_base = OTHER; note = 2-Prime-O-Methyl modified nucleoside
  modified_base order(1^2,31^32): mod_base = OTHER; note = (1,3-dimethylimidazolidin-2-ylidene) Phosphoramidate linkage
  modified_base order(2..20,21..31): mod_base = OTHER; note = Phosphorothioate linkage
  modified_base 20^21: mod_base = OTHER; note = Methylphosphonate linkage
  misc_feature 1..32: note = RM110443

SEQ ID NO: 652 - DNA, 32 bp, synthetic construct; identical to SEQ ID NO: 131
  source 1..32: mol_type = other DNA
  misc_feature 16..17: note = DNA
  misc_feature order(1..15,18..32): note = RNA
  modified_base 15: mod_base = OTHER; note = 2-Prime-O-Methoxyethyl modified nucleoside
  modified_base 16: mod_base = OTHER; note = DNA nucleotide carrying a 6-amino-5-nitro-3-yl-2(1H)-pyridone nucleobase
  modified_base order(8..10,13,19..20): mod_base = OTHER; note = 2-Prime-Fluoro modified nucleoside
  modified_base order(1..7,11..12,14,18,21..32): mod_base = OTHER; note = 2-Prime-O-Methyl modified nucleoside
  modified_base order(1^2,31^32): mod_base = OTHER; note = (1,3-dimethylimidazolidin-2-ylidene) Phosphoramidate linkage
  modified_base order(2..17,18..31): mod_base = OTHER; note = Phosphorothioate linkage
  modified_base 17^18: mod_base = OTHER; note = Methylphosphonate linkage
  misc_feature 1..32: note = RM110444

SEQ ID NO: 653 - DNA, 32 bp, synthetic construct; identical to SEQ ID NO: 132
  source 1..32: mol_type = other DNA
  misc_feature 13..14: note = DNA
  misc_feature order(1..12,15..32): note = RNA
  modified_base 12: mod_base = OTHER; note = 2-Prime-O-Methoxyethyl modified nucleoside
  modified_base 13: mod_base = OTHER; note = DNA nucleotide carrying a 6-amino-5-nitro-3-yl-2(1H)-pyridone nucleobase
  modified_base order(5..7,10,16..17): mod_base = OTHER; note = 2-Prime-Fluoro modified nucleoside
  modified_base order(1..4,8..9,11,15,18..32): mod_base = OTHER; note = 2-Prime-O-Methyl modified nucleoside
  modified_base order(1^2,31^32): mod_base = OTHER; note = (1,3-dimethylimidazolidin-2-ylidene) Phosphoramidate linkage
  modified_base order(2..14,15..31): mod_base = OTHER; note = Phosphorothioate linkage
  modified_base 14^15: mod_base = OTHER; note = Methylphosphonate linkage
  misc_feature 1..32: note = RM110445

SEQ ID NO: 654 - DNA, 32 bp, synthetic construct; identical to SEQ ID NO: 133
  source 1..32: mol_type = other DNA
  misc_feature 10..11: note = DNA
  misc_feature order(1..9,12..32): note = RNA
  modified_base 9: mod_base = OTHER; note = 2-Prime-O-Methoxyethyl modified nucleoside
  modified_base 10: mod_base = OTHER; note = DNA nucleotide carrying a 6-amino-5-nitro-3-yl-2(1H)-pyridone nucleobase
  modified_base order(2..4,7,13..14): mod_base = OTHER; note = 2-Prime-Fluoro modified nucleoside
  modified_base order(1,5..6,8,12,15..32): mod_base = OTHER; note = 2-Prime-O-Methyl modified nucleoside
  modified_base order(1^2,31^32): mod_base = OTHER; note = (1,3-dimethylimidazolidin-2-ylidene) Phosphoramidate linkage
  modified_base order(2..11,12..31): mod_base = OTHER; note = Phosphorothioate linkage
  modified_base 11^12: mod_base = OTHER; note = Methylphosphonate linkage
  misc_feature 1..32: note = RM110446

SEQ ID NO: 655 - DNA, 26 bp, synthetic construct
  source 1..26: mol_type = other DNA
  misc_feature 22..23: note = DNA
  misc_feature order(1..21,24..26): note = RNA
  modified_base 21: mod_base = OTHER; note = 2-Prime-O-Methoxyethyl modified nucleoside
  modified_base 22: mod_base = OTHER; note = DNA nucleotide carrying a 6-amino-5-nitro-3-yl-2(1H)-pyridone nucleobase
  modified_base order(1,4,11,14,17,25..26): mod_base = OTHER; note = 2-Prime-Fluoro modified nucleoside
  modified_base order(2..3,5..10,12..13,15..16,18..20,24): mod_base = OTHER; note = 2-Prime-O-Methyl modified nucleoside
  modified_base order(1^2,25^26): mod_base = OTHER; note = (1,3-dimethylimidazolidin-2-ylidene) Phosphoramidate linkage
  modified_base order(2..23,24^25): mod_base = OTHER; note = Phosphorothioate linkage
  modified_base 23^24: mod_base = OTHER; note = Methylphosphonate linkage
  misc_feature 1..26: note = RM110447
attcggtcaaacctctgaggantggg

SEQ ID NO: 656 - DNA, 26 bp, synthetic construct
  source 1..26: mol_type = other DNA
  misc_feature 22..23: note = DNA
  misc_feature order(1..21,24..26): note = RNA
  modified_base 21: mod_base = OTHER; note = 2-Prime-O-Methoxyethyl modified nucleoside
  modified_base 22: mod_base = OTHER; note = DNA nucleotide carrying a 6-amino-5-nitro-3-yl-2(1H)-pyridone nucleobase
  modified_base order(4,11,14,17,25): mod_base = OTHER; note = 2-Prime-Fluoro modified nucleoside
  modified_base order(1..3,5..10,12..13,15..16,18..20,24,26): mod_base = OTHER; note = 2-Prime-O-Methyl modified nucleoside
  modified_base order(1^2,25^26): mod_base = OTHER; note = (1,3-dimethylimidazolidin-2-ylidene) Phosphoramidate linkage
  modified_base order(2..23,24^25): mod_base = OTHER; note = Phosphorothioate linkage
  modified_base 23^24: mod_base = OTHER; note = Methylphosphonate linkage
  misc_feature 1..26: note = RM110448
attcggtcaaacctctgaggantggg

SEQ ID NO: 657 - DNA, 26 bp, synthetic construct
  source 1..26: mol_type = other DNA
  misc_feature 19..20: note = DNA
  misc_feature order(1..18,21..26): note = RNA
  modified_base 18: mod_base = OTHER; note = 2-Prime-O-Methoxyethyl modified nucleoside
  modified_base 19: mod_base = OTHER; note = DNA nucleotide carrying a 6-amino-5-nitro-3-yl-2(1H)-pyridone nucleobase
  modified_base order(1,8,11,14,22): mod_base = OTHER; note = 2-Prime-Fluoro modified nucleoside
  modified_base order(2..7,9..10,12..13,15..17,21,23..26): mod_base = OTHER; note = 2-Prime-O-Methyl modified nucleoside
  modified_base order(1^2,25^26): mod_base = OTHER; note = (1,3-dimethylimidazolidin-2-ylidene) Phosphoramidate linkage
  modified_base order(2..20,21..25): mod_base = OTHER; note = Phosphorothioate linkage
  modified_base 20^21: mod_base = OTHER; note = Methylphosphonate linkage
  misc_feature 1..26: note = RM110449
cggtcaaacctctgaggantgggttc

SEQ ID NO: 658 - DNA, 29 bp, synthetic construct
  source 1..29: mol_type = other DNA
  misc_feature 24..25: note = DNA
  misc_feature order(1..23,26..29): note = RNA
  modified_base 23: mod_base = OTHER; note = 2-Prime-O-Methoxyethyl modified nucleoside
  modified_base 24: mod_base = OTHER; note = DNA nucleotide carrying a 6-amino-5-nitro-3-yl-2(1H)-pyridone nucleobase
  modified_base order(6,13,16,19,27): mod_base = OTHER; note = 2-Prime-Fluoro modified nucleoside
  modified_base order(1..5,7..12,14..15,17..18,20..22,26,28..29): mod_base = OTHER; note = 2-Prime-O-Methyl modified nucleoside
  modified_base order(1^2,28^29): mod_base = OTHER; note = (1,3-dimethylimidazolidin-2-ylidene) Phosphoramidate linkage
  modified_base order(2..25,26..28): mod_base = OTHER; note = Phosphorothioate linkage
  modified_base 25^26: mod_base = OTHER; note = Methylphosphonate linkage
  misc_feature 1..29: note = RM110450
caattcggtcaaacctctgaggantgggt

SEQ ID NO: 659 - DNA, 29 bp, synthetic construct
  source 1..29: mol_type = other DNA
  misc_feature 21..22: note = DNA
  misc_feature order(1..20,23..29): note = RNA
  modified_base 20: mod_base = OTHER; note = 2-Prime-O-Methoxyethyl modified nucleoside
  modified_base 21: mod_base = OTHER; note = DNA nucleotide carrying a 6-amino-5-nitro-3-yl-2(1H)-pyridone nucleobase
  modified_base order(3,10,13,16,24): mod_base = OTHER; note = 2-Prime-Fluoro modified nucleoside
  modified_base order(1..2,4..9,11..12,14..15,17..19,23,25..29): mod_base = OTHER; note = 2-Prime-O-Methyl modified nucleoside
  modified_base order(1^2,28^29): mod_base = OTHER; note = (1,3-dimethylimidazolidin-2-ylidene) Phosphoramidate linkage
  modified_base order(2..22,23..28): mod_base = OTHER; note = Phosphorothioate linkage
  modified_base 22^23: mod_base = OTHER; note = Methylphosphonate linkage
  misc_feature 1..29: note = RM110451
ttcggtcaaacctctgaggantgggttca

SEQ ID NO: 660 - DNA, 23 bp, synthetic construct
  source 1..23: mol_type = other DNA
  misc_feature 18..19: note = DNA
  misc_feature order(1..17,20..23): note = RNA
  modified_base 17: mod_base = OTHER; note = 2-Prime-O-Methoxyethyl modified nucleoside
  modified_base 18: mod_base = OTHER; note = DNA nucleotide carrying a 6-amino-5-nitro-3-yl-2(1H)-pyridone nucleobase
  modified_base order(13,21): mod_base = OTHER; note = 2-Prime-Fluoro modified nucleoside
  modified_base order(1..12,14..16,20,22..23): mod_base = OTHER; note = 2-Prime-O-Methyl modified nucleoside
  modified_base order(1^2,22^23): mod_base = OTHER; note = (1,3-dimethylimidazolidin-2-ylidene) Phosphoramidate linkage
  modified_base order(2..19,20..22): mod_base = OTHER; note = Phosphorothioate linkage
  modified_base 19^20: mod_base = OTHER; note = Methylphosphonate linkage
  misc_feature 1..23: note = RM110452
ggtcaaacctctgaggantgggt

SEQ ID NO: 661 - DNA, 23 bp, synthetic construct
  source 1..23: mol_type = other DNA
  misc_feature 15..16: note = DNA
  misc_feature order(1..14,17..23): note = RNA
  modified_base 14: mod_base = OTHER; note = 2-Prime-O-Methoxyethyl modified nucleoside
  modified_base 15: mod_base = OTHER; note = DNA nucleotide carrying a 6-amino-5-nitro-3-yl-2(1H)-pyridone nucleobase
  modified_base order(10,18): mod_base = OTHER; note = 2-Prime-Fluoro modified nucleoside
  modified_base order(1..9,11..13,17,19..23): mod_base = OTHER; note = 2-Prime-O-Methyl modified nucleoside
  modified_base order(1^2,22^23): mod_base = OTHER; note = (1,3-dimethylimidazolidin-2-ylidene) Phosphoramidate linkage
  modified_base order(2..16,17..22): mod_base = OTHER; note = Phosphorothioate linkage
  modified_base 16^17: mod_base = OTHER; note = Methylphosphonate linkage
  misc_feature 1..23: note = RM110453
caaacctctgaggantgggttca

SEQ ID NO: 662 - DNA, 23 bp, synthetic construct
  source 1..23: mol_type = other DNA
  misc_feature 12..13: note = DNA
  misc_feature order(1..11,14..23): note = RNA
  modified_base 11: mod_base = OTHER; note = 2-Prime-O-Methoxyethyl modified nucleoside
  modified_base 12: mod_base = OTHER; note = DNA nucleotide carrying a 6-amino-5-nitro-3-yl-2(1H)-pyridone nucleobase
  modified_base order(7,15): mod_base = OTHER; note = 2-Prime-Fluoro modified nucleoside
  modified_base order(1..6,8..10,14,16..23): mod_base = OTHER; note = 2-Prime-O-Methyl modified nucleoside
  modified_base order(1^2,22^23): mod_base = OTHER; note = (1,3-dimethylimidazolidin-2-ylidene) Phosphoramidate linkage
  modified_base order(2..13,14..22): mod_base = OTHER; note = Phosphorothioate linkage
  modified_base 13^14: mod_base = OTHER; note = Methylphosphonate linkage
  misc_feature 1..23: note = RM110454
acctctgaggantgggttcattt

SEQ ID NO: 663 - DNA, 23 bp, synthetic construct
  source 1..23: mol_type = other DNA
  misc_feature 9..10: note = DNA
  misc_feature order(1..8,11..23): note = RNA
  modified_base 8: mod_base = OTHER; note = 2-Prime-O-Methoxyethyl modified nucleoside
  modified_base 9: mod_base = OTHER; note = DNA nucleotide carrying a 6-amino-5-nitro-3-yl-2(1H)-pyridone nucleobase
  modified_base order(4,12): mod_base = OTHER; note = 2-Prime-Fluoro modified nucleoside
  modified_base order(1..3,5..7,11,13..23): mod_base = OTHER; note = 2-Prime-O-Methyl modified nucleoside
  modified_base order(1^2,22^23): mod_base = OTHER; note = (1,3-dimethylimidazolidin-2-ylidene) Phosphoramidate linkage
  modified_base order(2..10,11..22): mod_base = OTHER; note = Phosphorothioate linkage
  modified_base 10^11: mod_base = OTHER; note = Methylphosphonate linkage
  misc_feature 1..23: note = RM110455
tctgaggantgggttcatttttc

SEQ ID NO: 664 - DNA, 23 bp, synthetic construct
  source 1..23: mol_type = other DNA
  misc_feature 6..7: note = DNA
  misc_feature order(1..5,8..23): note = RNA
  modified_base 5: mod_base = OTHER; note = 2-Prime-O-Methoxyethyl modified nucleoside
  modified_base 6: mod_base = OTHER; note = DNA nucleotide carrying a 6-amino-5-nitro-3-yl-2(1H)-pyridone nucleobase
  modified_base order(1,9): mod_base = OTHER; note = 2-Prime-Fluoro modified nucleoside
  modified_base order(2..4,8,10..23): mod_base = OTHER; note = 2-Prime-O-Methyl modified nucleoside
  modified_base order(1^2,22^23): mod_base = OTHER; note = (1,3-dimethylimidazolidin-2-ylidene) Phosphoramidate linkage
  modified_base order(2..7,8..22): mod_base = OTHER; note = Phosphorothioate linkage
  modified_base 7^8: mod_base = OTHER; note = Methylphosphonate linkage
  misc_feature 1..23: note = RM110456
gaggantgggttcatttttcttg

SEQ ID NO: 665 - DNA, 26 bp, synthetic construct
  source 1..26: mol_type = other DNA
  misc_feature 22..23: note = DNA
  misc_feature order(1..21,24..26): note = RNA
  modified_base 21: mod_base = OTHER; note = 2-Prime-O-Methoxyethyl modified nucleoside
  modified_base 22: mod_base = OTHER; note = DNA nucleotide carrying a 6-amino-5-nitro-3-yl-2(1H)-pyridone nucleobase
  modified_base order(17,25): mod_base = OTHER; note = 2-Prime-Fluoro modified nucleoside
  modified_base order(1..16,18..20,24,26): mod_base = OTHER; note = 2-Prime-O-Methyl modified nucleoside
  modified_base order(1^2,25^26): mod_base = OTHER; note = (1,3-dimethylimidazolidin-2-ylidene) Phosphoramidate linkage
  modified_base order(2..23,24^25): mod_base = OTHER; note = Phosphorothioate linkage
  modified_base 23^24: mod_base = OTHER; note = Methylphosphonate linkage
  misc_feature 1..26: note = RM110457
attcggtcaaacctctgaggantggg

SEQ ID NO: 666 - DNA, 26 bp, synthetic construct
  source 1..26: mol_type = other DNA
  misc_feature 19..20: note = DNA
  misc_feature order(1..18,21..26): note = RNA
  modified_base 18: mod_base = OTHER; note = 2-Prime-O-Methoxyethyl modified nucleoside
  modified_base 19: mod_base = OTHER; note = DNA nucleotide carrying a 6-amino-5-nitro-3-yl-2(1H)-pyridone nucleobase
  modified_base order(14,22): mod_base = OTHER; note = 2-Prime-Fluoro modified nucleoside
  modified_base order(1..13,15..17,21,23..26): mod_base = OTHER; note = 2-Prime-O-Methyl modified nucleoside
  modified_base order(1^2,25^26): mod_base = OTHER; note = (1,3-dimethylimidazolidin-2-ylidene) Phosphoramidate linkage
  modified_base order(2..20,21..25): mod_base = OTHER; note = Phosphorothioate linkage
  modified_base 20^21: mod_base = OTHER; note = Methylphosphonate linkage
  misc_feature 1..26: note = RM110458
cggtcaaacctctgaggantgggttc

SEQ ID NO: 667 - DNA, 26 bp, synthetic construct
  source 1..26: mol_type = other DNA
  misc_feature 16..17: note = DNA
  misc_feature order(1..15,18..26): note = RNA
  modified_base 15: mod_base = OTHER; note = 2-Prime-O-Methoxyethyl modified nucleoside
  modified_base 16: mod_base = OTHER; note = DNA nucleotide carrying a 6-amino-5-nitro-3-yl-2(1H)-pyridone nucleobase
  modified_base order(11,19): mod_base = OTHER; note = 2-Prime-Fluoro modified nucleoside
  modified_base order(1..10,12..14,18,20..26): mod_base = OTHER; note = 2-Prime-O-Methyl modified nucleoside
  modified_base order(1^2,25^26): mod_base = OTHER; note = (1,3-dimethylimidazolidin-2-ylidene) Phosphoramidate linkage
  modified_base order(2..17,18..25): mod_base = OTHER; note = Phosphorothioate linkage
  modified_base 17^18: mod_base = OTHER; note = Methylphosphonate linkage
  misc_feature 1..26: note = RM110459
tcaaacctctgaggantgggttcatt

SEQ ID NO: 668 - DNA, 26 bp, synthetic construct
  source 1..26: mol_type = other DNA
  misc_feature 13..14: note = DNA
  misc_feature order(1..12,15..26): note = RNA
  modified_base 12: mod_base = OTHER; note = 2-Prime-O-Methoxyethyl modified nucleoside
  modified_base 13: mod_base = OTHER; note = DNA nucleotide carrying a 6-amino-5-nitro-3-yl-2(1H)-pyridone nucleobase
  modified_base order(8,16): mod_base = OTHER; note = 2-Prime-Fluoro modified nucleoside
  modified_base order(1..7,9..11,15,17..26): mod_base = OTHER; note = 2-Prime-O-Methyl modified nucleoside
  modified_base order(1^2,25^26): mod_base = OTHER; note = (1,3-dimethylimidazolidin-2-ylidene) Phosphoramidate linkage
  modified_base order(2..14,15..25): mod_base = OTHER; note = Phosphorothioate linkage
  modified_base 14^15: mod_base = OTHER; note = Methylphosphonate linkage
  misc_feature 1..26: note = RM110460
aacctctgaggantgggttcattttt

SEQ ID NO: 669 - DNA, 26 bp, synthetic construct
  source 1..26: mol_type = other DNA
  misc_feature 10..11: note = DNA
  misc_feature order(1..9,12..26): note = RNA
  modified_base 9: mod_base = OTHER; note = 2-Prime-O-Methoxyethyl modified nucleoside
  modified_base 10: mod_base = OTHER; note = DNA nucleotide carrying a 6-amino-5-nitro-3-yl-2(1H)-pyridone nucleobase
  modified_base order(5,13): mod_base = OTHER; note = 2-Prime-Fluoro modified nucleoside
  modified_base order(1..4,6..8,12,14..26): mod_base = OTHER; note = 2-Prime-O-Methyl modified nucleoside
  modified_base order(1^2,25^26): mod_base = OTHER; note = (1,3-dimethylimidazolidin-2-ylidene) Phosphoramidate linkage
  modified_base order(2..11,12..25): mod_base = OTHER; note = Phosphorothioate linkage
  modified_base 11^12: mod_base = OTHER; note = Methylphosphonate linkage
  misc_feature 1..26: note = RM110461
ctctgaggantgggttcatttttctt

SEQ ID NO: 670 - DNA, 26 bp, synthetic construct
  source 1..26: mol_type = other DNA
  misc_feature 7..8: note = DNA
  misc_feature order(1..6,9..26): note = RNA
  modified_base 6: mod_base = OTHER; note = 2-Prime-O-Methoxyethyl modified nucleoside
  modified_base 7: mod_base = OTHER; note = DNA nucleotide carrying a 6-amino-5-nitro-3-yl-2(1H)-pyridone nucleobase
  modified_base order(2,10): mod_base = OTHER; note = 2-Prime-Fluoro modified nucleoside
  modified_base order(1,3..5,9,11..26): mod_base = OTHER; note = 2-Prime-O-Methyl modified nucleoside
  modified_base order(1^2,25^26): mod_base = OTHER; note = (1,3-dimethylimidazolidin-2-ylidene) Phosphoramidate linkage
  modified_base order(2..8,9..25): mod_base = OTHER; note = Phosphorothioate linkage
  modified_base 8^9: mod_base = OTHER; note = Methylphosphonate linkage
  misc_feature 1..26: note = RM110462
tgaggantgggttcatttttcttgtc

SEQ ID NO: 671 - DNA, 29 bp, synthetic construct
  source 1..29: mol_type = other DNA
  misc_feature 24..25: note = DNA
  misc_feature order(1..23,26..29): note = RNA
  modified_base 23: mod_base = OTHER; note = 2-Prime-O-Methoxyethyl modified nucleoside
  modified_base 24: mod_base = OTHER; note = DNA nucleotide carrying a 6-amino-5-nitro-3-yl-2(1H)-pyridone nucleobase
  modified_base order(19,27): mod_base = OTHER; note = 2-Prime-Fluoro modified nucleoside
  modified_base order(1..18,20..22,26,28..29): mod_base = OTHER; note = 2-Prime-O-Methyl modified nucleoside
  modified_base order(1^2,28^29): mod_base = OTHER; note = (1,3-dimethylimidazolidin-2-ylidene) Phosphoramidate linkage
  modified_base order(2..25,26..28): mod_base = OTHER; note = Phosphorothioate linkage
  modified_base 25^26: mod_base = OTHER; note = Methylphosphonate linkage
  misc_feature 1..29: note = RM110463
caattcggtcaaacctctgaggantgggt

SEQ ID NO: 672 - DNA, 29 bp, synthetic construct
  source 1..29: mol_type = other DNA
  misc_feature 21..22: note = DNA
  misc_feature order(1..20,23..29): note = RNA
  modified_base 20: mod_base = OTHER; note = 2-Prime-O-Methoxyethyl modified nucleoside
  modified_base 21: mod_base = OTHER; note = DNA nucleotide carrying a 6-amino-5-nitro-3-yl-2(1H)-pyridone nucleobase
  modified_base order(16,24): mod_base = OTHER; note = 2-Prime-Fluoro modified nucleoside
  modified_base order(1..15,17..19,23,25..29): mod_base = OTHER; note = 2-Prime-O-Methyl modified nucleoside
  modified_base order(1^2,28^29): mod_base = OTHER; note = (1,3-dimethylimidazolidin-2-ylidene) Phosphoramidate linkage
  modified_base order(2..22,23..28): mod_base = OTHER; note = Phosphorothioate linkage
  modified_base 22^23: mod_base = OTHER; note = Methylphosphonate linkage
  misc_feature 1..29: note = RM110464
ttcggtcaaacctctgaggantgggttca

SEQ ID NO: 673 - DNA, 29 bp, synthetic construct
  source 1..29: mol_type = other DNA
  misc_feature 18..19: note = DNA
  misc_feature order(1..17,20..29): note = RNA
  modified_base 17: mod_base = OTHER; note = 2-Prime-O-Methoxyethyl modified nucleoside
  modified_base 18: mod_base = OTHER; note = DNA nucleotide carrying a 6-amino-5-nitro-3-yl-2(1H)-pyridone nucleobase
  modified_base order(13,21): mod_base = OTHER; note = 2-Prime-Fluoro modified nucleoside
  modified_base order(1..12,14..16,20,22..29): mod_base = OTHER; note = 2-Prime-O-Methyl modified nucleoside
  modified_base order(1^2,28^29): mod_base = OTHER; note = (1,3-dimethylimidazolidin-2-ylidene) Phosphoramidate linkage
  modified_base order(2..19,20..28): mod_base = OTHER; note = Phosphorothioate linkage
  modified_base 19^20: mod_base = OTHER; note = Methylphosphonate linkage
  misc_feature 1..29: note = RM110465
ggtcaaacctctgaggantgggttcattt

SEQ ID NO: 674 - DNA, 29 bp, synthetic construct
  source 1..29: mol_type = other DNA
  misc_feature 15..16: note = DNA
  misc_feature order(1..14,17..29): note = RNA
  modified_base 14: mod_base = OTHER; note = 2-Prime-O-Methoxyethyl modified nucleoside
  modified_base 15: mod_base = OTHER; note = DNA nucleotide carrying a 6-amino-5-nitro-3-yl-2(1H)-pyridone nucleobase
  modified_base order(10,18): mod_base = OTHER; note = 2-Prime-Fluoro modified nucleoside
  modified_base order(1..9,11..13,17,19..29): mod_base = OTHER; note = 2-Prime-O-Methyl modified nucleoside
  modified_base order(1^2,28^29): mod_base = OTHER; note = (1,3-dimethylimidazolidin-2-ylidene) Phosphoramidate linkage
  modified_base order(2..16,17..28): mod_base = OTHER; note = Phosphorothioate linkage
  modified_base 16^17: mod_base = OTHER; note = Methylphosphonate linkage
  misc_feature 1..29: note = RM110466
caaacctctgaggantgggttcatttttc

SEQ ID NO: 675 - DNA, 29 bp, synthetic construct
  source 1..29: mol_type = other DNA
  misc_feature 12..13: note = DNA
  misc_feature order(1..11,14..29): note = RNA
  modified_base 11: mod_base = OTHER; note = 2-Prime-O-Methoxyethyl modified nucleoside
  modified_base 12: mod_base = OTHER; note = DNA nucleotide carrying a 6-amino-5-nitro-3-yl-2(1H)-pyridone nucleobase
  modified_base order(7,15): mod_base = OTHER; note = 2-Prime-Fluoro modified nucleoside
  modified_base order(1..6,8..10,14,16..29): mod_base = OTHER; note = 2-Prime-O-Methyl modified nucleoside
  modified_base order(1^2,28^29): mod_base = OTHER; note = (1,3-dimethylimidazolidin-2-ylidene) Phosphoramidate linkage
  modified_base order(2..13,14..28): mod_base = OTHER; note = Phosphorothioate linkage
  modified_base 13^14: mod_base = OTHER; note = Methylphosphonate linkage
  misc_feature 1..29: note = RM110467
acctctgaggantgggttcatttttcttg

SEQ ID NO: 676 - DNA, 29 bp, synthetic construct
  source 1..29: mol_type = other DNA
  misc_feature 9..10: note = DNA
  misc_feature order(1..8,11..29): note = RNA
  modified_base 8: mod_base = OTHER; note = 2-Prime-O-Methoxyethyl modified nucleoside
  modified_base 9: mod_base = OTHER; note = DNA nucleotide carrying a 6-amino-5-nitro-3-yl-2(1H)-pyridone nucleobase
  modified_base order(4,12): mod_base = OTHER; note = 2-Prime-Fluoro modified nucleoside
  modified_base order(1..3,5..7,11,13..29): mod_base = OTHER; note = 2-Prime-O-Methyl modified nucleoside
  modified_base order(1^2,28^29): mod_base = OTHER; note = (1,3-dimethylimidazolidin-2-ylidene) Phosphoramidate linkage
  modified_base order(2..10,11..28): mod_base = OTHER; note = Phosphorothioate linkage
  modified_base 10^11: mod_base = OTHER; note = Methylphosphonate linkage
  misc_feature 1..29: note = RM110468
tctgaggantgggttcatttttcttgtct

SEQ ID NO: 677 - DNA, 29 bp, synthetic construct
  source 1..29: mol_type = other DNA
  misc_feature 6..7: note = DNA
  misc_feature order(1..5,8..29): note = RNA
  modified_base 5: mod_base = OTHER; note = 2-Prime-O-Methoxyethyl modified nucleoside
  modified_base 6: mod_base = OTHER; note = DNA nucleotide carrying a 6-amino-5-nitro-3-yl-2(1H)-pyridone nucleobase
  modified_base order(1,9): mod_base = OTHER; note = 2-Prime-Fluoro modified nucleoside
  modified_base order(2..4,8,10..29): mod_base = OTHER; note = 2-Prime-O-Methyl modified nucleoside
  modified_base order(1^2,28^29): mod_base = OTHER; note = (1,3-dimethylimidazolidin-2-ylidene) Phosphoramidate linkage
  modified_base order(2..7,8..28): mod_base = OTHER; note = Phosphorothioate linkage
  modified_base 7^8: mod_base = OTHER; note = Methylphosphonate linkage
  misc_feature 1..29: note = RM110469
gaggantgggttcatttttcttgtctctt

SEQ ID NO: 678 - DNA, 32 bp, synthetic construct; identical to SEQ ID NO: 19
  source 1..32: mol_type = other DNA
  misc_feature 19..20: note = DNA
  misc_feature order(1..18,21..32): note = RNA
  modified_base 18: mod_base = OTHER; note = 2-Prime-O-Methoxyethyl modified nucleoside
  modified_base 19: mod_base = OTHER; note = DNA nucleotide carrying a 6-amino-5-nitro-3-yl-2(1H)-pyridone nucleobase
  modified_base order(2,5,8,10,17,22,25,27,32): mod_base = OTHER; note = 2-Prime-Fluoro modified nucleoside
  modified_base order(1,3..4,6..7,9,11..16,21,23..24,26,28..31): mod_base = OTHER; note = 2-Prime-O-Methyl modified nucleoside
  modified_base order(1^2,31^32): mod_base = OTHER; note = (1,3-dimethylimidazolidin-2-ylidene) Phosphoramidate linkage
  modified_base order(2..20,21..31): mod_base = OTHER; note = Phosphorothioate linkage
  modified_base 20^21: mod_base = OTHER; note = Methylphosphonate linkage
  misc_feature 1..32: note = RM110470

SEQ ID NO: 679 - DNA, 32 bp, synthetic construct; identical to SEQ ID NO: 132
  source 1..32: mol_type = other DNA
  misc_feature 13..14: note = DNA
  misc_feature order(1..12,15..32): note = RNA
  modified_base 12: mod_base = OTHER; note = 2-Prime-O-Methoxyethyl modified nucleoside
  modified_base 13: mod_base = OTHER; note = DNA nucleotide carrying a 6-amino-5-nitro-3-yl-2(1H)-pyridone nucleobase
  modified_base order(2,7,9,16..17,24,26,29,32): mod_base = OTHER; note = 2-Prime-Fluoro modified nucleoside
  modified_base order(1,3..6,8,10..11,15,18..23,25,27..28,30..31): mod_base = OTHER; note = 2-Prime-O-Methyl modified nucleoside
  modified_base order(1^2,31^32): mod_base = OTHER; note = (1,3-dimethylimidazolidin-2-ylidene) Phosphoramidate linkage
  modified_base order(2..14,15..31): mod_base = OTHER; note = Phosphorothioate linkage
  modified_base 14^15: mod_base = OTHER; note = Methylphosphonate linkage
  misc_feature 1..32: note = RM110471

SEQ ID NO: 680 - DNA, 23 bp, synthetic construct
  source 1..23: mol_type = other DNA
  misc_feature 15..16: note = DNA
  misc_feature order(1..14,17..23): note = RNA
  modified_base 14: mod_base = OTHER; note = 2-Prime-O-Methoxyethyl modified nucleoside
  modified_base 15: mod_base = OTHER; note = DNA nucleotide carrying a 6-amino-5-nitro-3-yl-2(1H)-pyridone nucleobase
  modified_base order(1,4,6,13,18,21): mod_base = OTHER; note = 2-Prime-Fluoro modified nucleoside
  modified_base order(2..3,5,7..12,17,19..20,22..23): mod_base = OTHER; note = 2-Prime-O-Methyl modified nucleoside
  modified_base order(1^2,22^23): mod_base = OTHER; note = (1,3-dimethylimidazolidin-2-ylidene) Phosphoramidate linkage
  modified_base order(2..16,17..22): mod_base = OTHER; note = Phosphorothioate linkage
  modified_base 16^17: mod_base = OTHER; note = Methylphosphonate linkage
  misc_feature 1..23: note = RM110472
caaacctctgaggantgggttca

SEQ ID NO: 681 - DNA, 32 bp, synthetic construct; identical to SEQ ID NO: 128
  source 1..32: mol_type = other DNA
  misc_feature 25..26: note = DNA
  misc_feature order(1..24,27..32): note = RNA
  modified_base 24: mod_base = OTHER; note = 2-Prime-O-Methoxyethyl modified nucleoside
  modified_base 25: mod_base = OTHER; note = DNA nucleotide carrying a 6-amino-5-nitro-3-yl-2(1H)-pyridone nucleobase
  modified_base order(11,14,16,23,28,31): mod_base = OTHER; note = 2-Prime-Fluoro modified nucleoside
  modified_base order(1..10,12..13,15,17..22,27,29..30,32): mod_base = OTHER; note = 2-Prime-O-Methyl modified nucleoside
  modified_base order(1^2,31^32): mod_base = OTHER; note = (1,3-dimethylimidazolidin-2-ylidene) Phosphoramidate linkage
  modified_base order(2..26,27..31): mod_base = OTHER; note = Phosphorothioate linkage
  modified_base 26^27: mod_base = OTHER; note = Methylphosphonate linkage
  misc_feature 1..32: note = RM110473

SEQ ID NO: 682 - DNA, 32 bp, synthetic construct; identical to SEQ ID NO: 129
  source 1..32: mol_type = other DNA
  misc_feature 22..23: note = DNA
  misc_feature order(1..21,24..32): note = RNA
  modified_base 21: mod_base = OTHER; note = 2-Prime-O-Methoxyethyl modified nucleoside
  modified_base 22: mod_base = OTHER; note = DNA nucleotide carrying a 6-amino-5-nitro-3-yl-2(1H)-pyridone nucleobase
  modified_base order(8,11,13,20,25,28): mod_base = OTHER; note = 2-Prime-Fluoro modified nucleoside
  modified_base order(1..7,9..10,12,14..19,24,26..27,29..32): mod_base = OTHER; note = 2-Prime-O-Methyl modified nucleoside
  modified_base order(1^2,31^32): mod_base = OTHER; note = (1,3-dimethylimidazolidin-2-ylidene) Phosphoramidate linkage
  modified_base order(2..23,24..31): mod_base = OTHER; note = Phosphorothioate linkage
  modified_base 23^24: mod_base = OTHER; note = Methylphosphonate linkage
  misc_feature 1..32: note = RM110474

SEQ ID NO: 683 - DNA, 32 bp, synthetic construct; identical to SEQ ID NO: 19
  source 1..32: mol_type = other DNA
  misc_feature 19..20: note = DNA
  misc_feature order(1..18,21..32): note = RNA
  modified_base 18: mod_base = OTHER; note = 2-Prime-O-Methoxyethyl modified nucleoside
  modified_base 19: mod_base = OTHER; note = DNA nucleotide carrying a 6-amino-5-nitro-3-yl-2(1H)-pyridone nucleobase
  modified_base order(5,8,10,17,22,25): mod_base = OTHER; note = 2-Prime-Fluoro modified nucleoside
  modified_base order(1..4,6..7,9,11..16,21,23..24,26..32): mod_base = OTHER; note = 2-Prime-O-Methyl modified nucleoside
  modified_base order(1^2,31^32): mod_base = OTHER; note = (1,3-dimethylimidazolidin-2-ylidene) Phosphoramidate linkage
  modified_base order(2..20,21..31): mod_base = OTHER; note = Phosphorothioate linkage
  modified_base 20^21: mod_base = OTHER; note = Methylphosphonate linkage
  misc_feature 1..32: note = RM110475

SEQ ID NO: 684 - DNA, 32 bp, synthetic construct; identical to SEQ ID NO: 131
  source 1..32: mol_type = other DNA
  misc_feature 16..17: note = DNA
  misc_feature order(1..15,18..32): note = RNA
  modified_base 15: mod_base = OTHER; note = 2-Prime-O-Methoxyethyl modified nucleoside
  modified_base 16: mod_base = OTHER; note = DNA nucleotide carrying a 6-amino-5-nitro-3-yl-2(1H)-pyridone nucleobase
  modified_base order(2,5,7,14,19,22): mod_base = OTHER; note = 2-Prime-Fluoro modified nucleoside
  modified_base order(1,3..4,6,8..13,18,20..21,23..32): mod_base = OTHER; note = 2-Prime-O-Methyl modified nucleoside
  modified_base order(1^2,31^32): mod_base = OTHER; note = (1,3-dimethylimidazolidin-2-ylidene) Phosphoramidate linkage
  modified_base order(2..17,18..31): mod_base = OTHER; note = Phosphorothioate linkage
  modified_base 17^18: mod_base = OTHER; note = Methylphosphonate linkage
  misc_feature 1..32: note = RM110476

SEQ ID NO: 685 - DNA, 23 bp, synthetic construct
  source 1..23: mol_type = other DNA
  misc_feature 6..7: note = DNA
  misc_feature order(1..5,8..23): note = RNA
  modified_base 5: mod_base = OTHER; note = 2-Prime-O-Methoxyethyl modified nucleoside
  modified_base 6: mod_base = OTHER; note = DNA nucleotide carrying a 6-amino-5-nitro-3-yl-2(1H)-pyridone nucleobase
  modified_base order(2,9..10,17,19,22): mod_base = OTHER; note = 2-Prime-Fluoro modified nucleoside
  modified_base order(1,3..4,8,11..16,18,20..21,23): mod_base = OTHER; note = 2-Prime-O-Methyl modified nucleoside
  modified_base order(1^2,22^23): mod_base = OTHER; note = (1,3-dimethylimidazolidin-2-ylidene) Phosphoramidate linkage
  modified_base order(2..7,8..22): mod_base = OTHER; note = Phosphorothioate linkage
  modified_base 7^8: mod_base = OTHER; note = Methylphosphonate linkage
  misc_feature 1..23: note = RM110477
gaggantgggttcatttttcttg

SEQ ID NO: 686 - DNA, 32 bp, synthetic construct; identical to SEQ ID NO: 131
  source 1..32: mol_type = other DNA
  misc_feature 16..17: note = DNA
  misc_feature order(1..15,18..32): note = RNA
  modified_base 15: mod_base = OTHER; note = 2-Prime-O-Methoxyethyl modified nucleoside
  modified_base 16: mod_base = OTHER; note = DNA nucleotide carrying a 6-amino-5-nitro-3-yl-2(1H)-pyridone nucleobase
  modified_base order(12,19..20,27,29,32): mod_base = OTHER; note = 2-Prime-Fluoro modified nucleoside
  modified_base order(1..11,13..14,18,21..26,28,30..31): mod_base = OTHER; note = 2-Prime-O-Methyl modified nucleoside
  modified_base order(1^2,31^32): mod_base = OTHER; note = (1,3-dimethylimidazolidin-2-ylidene) Phosphoramidate linkage
  modified_base order(2..17,18..31): mod_base = OTHER; note = Phosphorothioate linkage
  modified_base 17^18: mod_base = OTHER; note = Methylphosphonate linkage
  misc_feature 1..32: note = RM110478

SEQ ID NO: 687 - DNA, 32 bp, synthetic construct; identical to SEQ ID NO: 132
  source 1..32: mol_type = other DNA
  misc_feature 13..14: note = DNA
  misc_feature order(1..12,15..32): note = RNA
  modified_base 12: mod_base = OTHER; note = 2-Prime-O-Methoxyethyl modified nucleoside
  modified_base 13: mod_base = OTHER; note = DNA nucleotide carrying a 6-amino-5-nitro-3-yl-2(1H)-pyridone nucleobase
  modified_base order(9,16..17,24,26,29): mod_base = OTHER; note = 2-Prime-Fluoro modified nucleoside
  modified_base order(1..8,10..11,15,18..23,25,27..28,30..32): mod_base = OTHER; note = 2-Prime-O-Methyl modified nucleoside
  modified_base order(1^2,31^32): mod_base = OTHER; note = (1,3-dimethylimidazolidin-2-ylidene) Phosphoramidate linkage
  modified_base order(2..14,15..31): mod_base = OTHER; note = Phosphorothioate linkage
  modified_base 14^15: mod_base = OTHER; note = Methylphosphonate linkage
  misc_feature 1..32: note = RM110479

SEQ ID NO: 688 - DNA, 32 bp, synthetic construct; identical to SEQ ID NO: 133
  source 1..32: mol_type = other DNA
  misc_feature 10..11: note = DNA
  misc_feature order(1..9,12..32): note = RNA
  modified_base 9: mod_base = OTHER; note = 2-Prime-O-Methoxyethyl modified nucleoside
  modified_base 10: mod_base = OTHER; note = DNA nucleotide carrying a 6-amino-5-nitro-3-yl-2(1H)-pyridone nucleobase
  modified_base order(6,13..14,21,23,26): mod_base = OTHER; note = 2-Prime-Fluoro modified nucleoside
  modified_base order(1..5,7..8,12,15..20,22,24..25,27..32): mod_base = OTHER; note = 2-Prime-O-Methyl modified nucleoside
  modified_base order(1^2,31^32): mod_base = OTHER; note = (1,3-dimethylimidazolidin-2-ylidene) Phosphoramidate linkage
  modified_base order(2..11,12..31): mod_base = OTHER; note = Phosphorothioate linkage
  modified_base 11^12: mod_base = OTHER; note = Methylphosphonate linkage
  misc_feature 1..32: note = RM110480

SEQ ID NO: 689 - DNA, 32 bp, synthetic construct; identical to SEQ ID NO: 134
  source 1..32: mol_type = other DNA
  misc_feature 7..8: note = DNA
  misc_feature order(1..6,9..32): note = RNA
  modified_base 6: mod_base = OTHER; note = 2-Prime-O-Methoxyethyl modified nucleoside
  modified_base 7: mod_base = OTHER; note = DNA nucleotide carrying a 6-amino-5-nitro-3-yl-2(1H)-pyridone nucleobase
  modified_base order(3,10..11,18,20,23): mod_base = OTHER; note = 2-Prime-Fluoro modified nucleoside
  modified_base order(1..2,4..5,9,12..17,19,21..22,24..32): mod_base = OTHER; note = 2-Prime-O-Methyl modified nucleoside
  modified_base order(1^2,31^32): mod_base = OTHER; note = (1,3-dimethylimidazolidin-2-ylidene) Phosphoramidate linkage
  modified_base order(2..8,9..31): mod_base = OTHER; note = Phosphorothioate linkage
  modified_base 8^9: mod_base = OTHER; note = Methylphosphonate linkage
  misc_feature 1..32: note = RM110481

SEQ ID NO: 690 - DNA, 32 bp, synthetic construct; identical to SEQ ID NO: 128
  source 1..32: mol_type = other DNA
  misc_feature 25..26: note = DNA
  misc_feature order(1..24,27..32): note = RNA
  modified_base 24: mod_base = OTHER; note = 2-Prime-O-Methoxyethyl modified nucleoside
  modified_base 25: mod_base = OTHER; note = DNA nucleotide carrying a 6-amino-5-nitro-3-yl-2(1H)-pyridone nucleobase
  modified_base order(23,28,31): mod_base = OTHER; note = 2-Prime-Fluoro modified nucleoside
  modified_base order(1..22,27,29..30,32): mod_base = OTHER; note = 2-Prime-O-Methyl modified nucleoside
  modified_base order(1^2,31^32): mod_base = OTHER; note = (1,3-dimethylimidazolidin-2-ylidene) Phosphoramidate linkage
  modified_base order(2..26,27..31): mod_base = OTHER; note = Phosphorothioate linkage
  modified_base 26^27: mod_base = OTHER; note = Methylphosphonate linkage
  misc_feature 1..32: note = RM110482

SEQ ID NO: 691 - DNA, 32 bp, synthetic construct; identical to SEQ ID NO: 129
  source 1..32: mol_type = other DNA
  misc_feature 22..23: note = DNA
  misc_feature order(1..21,24..32): note = RNA
  modified_base 21: mod_base = OTHER; note = 2-Prime-O-Methoxyethyl modified nucleoside
  modified_base 22: mod_base = OTHER; note = DNA nucleotide carrying a 6-amino-5-nitro-3-yl-2(1H)-pyridone nucleobase
  modified_base order(20,25,28): mod_base = OTHER; note = 2-Prime-Fluoro modified nucleoside
  modified_base order(1..19,24,26..27,29..32): mod_base = OTHER; note = 2-Prime-O-Methyl modified nucleoside
  modified_base order(1^2,31^32): mod_base = OTHER; note = (1,3-dimethylimidazolidin-2-ylidene) Phosphoramidate linkage
  modified_base order(2..23,24..31): mod_base = OTHER; note = Phosphorothioate linkage
  modified_base 23^24: mod_base = OTHER; note = Methylphosphonate linkage
  misc_feature 1..32: note = RM110483

SEQ ID NO: 692 - DNA, 32 bp, synthetic construct; identical to SEQ ID NO: 19
  source 1..32: mol_type = other DNA
  misc_feature 19..20: note = DNA
  misc_feature order(1..18,21..32): note = RNA
  modified_base 18: mod_base = OTHER; note = 2-Prime-O-Methoxyethyl modified nucleoside
  modified_base 19: mod_base = OTHER; note = DNA nucleotide carrying a 6-amino-5-nitro-3-yl-2(1H)-pyridone nucleobase
  modified_base order(17,22,25): mod_base = OTHER; note = 2-Prime-Fluoro modified nucleoside
  modified_base order(1..16,21,23..24,26..32): mod_base = OTHER; note = 2-Prime-O-Methyl modified nucleoside
  modified_base order(1^2,31^32): mod_base = OTHER; note = (1,3-dimethylimidazolidin-2-ylidene) Phosphoramidate linkage
  modified_base order(2..20,21..31): mod_base = OTHER; note = Phosphorothioate linkage
  modified_base 20^21: mod_base = OTHER; note = Methylphosphonate linkage
  misc_feature 1..32: note = RM110484

SEQ ID NO: 693 - DNA, 32 bp, synthetic construct; identical to SEQ ID NO: 131
  source 1..32: mol_type = other DNA
  misc_feature 16..17: note = DNA
  misc_feature order(1..15,18..32): note = RNA
  modified_base 15: mod_base = OTHER; note = 2-Prime-O-Methoxyethyl modified nucleoside
  modified_base 16: mod_base = OTHER; note = DNA nucleotide carrying a 6-amino-5-nitro-3-yl-2(1H)-pyridone nucleobase
  modified_base order(14,19,22): mod_base = OTHER; note = 2-Prime-Fluoro modified nucleoside
  modified_base order(1..13,18,20..21,23..32): mod_base = OTHER; note = 2-Prime-O-Methyl modified nucleoside
  modified_base order(1^2,31^32): mod_base = OTHER; note = (1,3-dimethylimidazolidin-2-ylidene) Phosphoramidate linkage
  modified_base order(2..17,18..31): mod_base = OTHER; note = Phosphorothioate linkage
  modified_base 17^18: mod_base = OTHER; note = Methylphosphonate linkage
  misc_feature 1..32: note = RM110485

SEQ ID NO: 694 - DNA, 32 bp, synthetic construct; identical to SEQ ID NO: 132
  source 1..32: mol_type = other DNA
  misc_feature 13..14: note = DNA
  misc_feature order(1..12,15..32): note = RNA
  modified_base 12: mod_base = OTHER; note = 2-Prime-O-Methoxyethyl modified nucleoside
  modified_base 13: mod_base = OTHER; note = DNA nucleotide carrying a 6-amino-5-nitro-3-yl-2(1H)-pyridone nucleobase
  modified_base order(11,16,19): mod_base = OTHER; note = 2-Prime-Fluoro modified nucleoside
  modified_base order(1..10,15,17..18,20..32): mod_base = OTHER; note = 2-Prime-O-Methyl modified nucleoside
  modified_base order(1^2,31^32): mod_base = OTHER; note = (1,3-dimethylimidazolidin-2-ylidene) Phosphoramidate linkage
  modified_base order(2..14,15..31): mod_base = OTHER; note = Phosphorothioate linkage
  modified_base 14^15: mod_base = OTHER; note = Methylphosphonate linkage
  misc_feature 1..32: note = RM110486

SEQ ID NO: 695 - DNA, 32 bp, synthetic construct; identical to SEQ ID NO: 133
  source 1..32: mol_type = other DNA
  misc_feature 10..11: note = DNA
  misc_feature order(1..9,12..32): note = RNA
  modified_base 9: mod_base = OTHER; note = 2-Prime-O-Methoxyethyl modified nucleoside
  modified_base 10: mod_base = OTHER; note = DNA nucleotide carrying a 6-amino-5-nitro-3-yl-2(1H)-pyridone nucleobase
  modified_base order(8,13,16): mod_base = OTHER; note = 2-Prime-Fluoro modified nucleoside
  modified_base order(1..7,12,14..15,17..32): mod_base = OTHER; note = 2-Prime-O-Methyl modified nucleoside
  modified_base order(1^2,31^32): mod_base = OTHER; note = (1,3-dimethylimidazolidin-2-ylidene) Phosphoramidate linkage
  modified_base order(2..11,12..31): mod_base = OTHER; note = Phosphorothioate linkage
  modified_base 11^12: mod_base = OTHER; note = Methylphosphonate linkage
  misc_feature 1..32: note = RM110487

SEQ ID NO: 696 - DNA, 32 bp, synthetic construct; identical to SEQ ID NO: 134
  source 1..32: mol_type = other DNA
  misc_feature 7..8: note = DNA
  misc_feature order(1..6,9..32): note = RNA
  modified_base 6: mod_base = OTHER; note = 2-Prime-O-Methoxyethyl modified nucleoside
  modified_base 7: mod_base = OTHER; note = DNA nucleotide carrying a 6-amino-5-nitro-3-yl-2(1H)-pyridone nucleobase
  modified_base order(5,10,13): mod_base = OTHER; note = 2-Prime-Fluoro modified nucleoside
  modified_base order(1..4,9,11..12,14..32): mod_base = OTHER; note = 2-Prime-O-Methyl modified nucleoside
  modified_base order(1^2,31^32): mod_base = OTHER; note = (1,3-dimethylimidazolidin-2-ylidene) Phosphoramidate linkage
  modified_base order(2..8,9..31): mod_base = OTHER; note = Phosphorothioate linkage
  modified_base 8^9: mod_base = OTHER; note = Methylphosphonate linkage
  misc_feature 1..32: note = RM110488

SEQ ID NO: 697 - DNA, 32 bp, synthetic construct; identical to SEQ ID NO: 127
  source 1..32: mol_type = other DNA
  misc_feature 28..29: note = DNA
  misc_feature order(1..27,30..32): note = RNA
  modified_base 27: mod_base = OTHER; note = 2-Prime-O-Methoxyethyl modified nucleoside
  modified_base 28: mod_base = OTHER; note = DNA nucleotide carrying a 6-amino-5-nitro-3-yl-2(1H)-pyridone nucleobase
  modified_base order(24,31..32): mod_base = OTHER; note = 2-Prime-Fluoro modified nucleoside
  modified_base order(1..23,25..26,30): mod_base = OTHER; note = 2-Prime-O-Methyl modified nucleoside
  modified_base order(1^2,31^32): mod_base = OTHER; note = (1,3-dimethylimidazolidin-2-ylidene) Phosphoramidate linkage
  modified_base order(2..29,30^31): mod_base = OTHER; note = Phosphorothioate linkage
  modified_base 29^30: mod_base = OTHER; note = Methylphosphonate linkage
  misc_feature 1..32: note = RM110489

SEQ ID NO: 698 - DNA, 32 bp, synthetic construct; identical to SEQ ID NO: 128
  source 1..32: mol_type = other DNA
  misc_feature 25..26: note = DNA
  misc_feature order(1..24,27..32): note = RNA
  modified_base 24: mod_base = OTHER; note = 2-Prime-O-Methoxyethyl modified nucleoside
  modified_base 25: mod_base = OTHER; note = DNA nucleotide carrying a 6-amino-5-nitro-3-yl-2(1H)-pyridone nucleobase
  modified_base order(21,28..29): mod_base = OTHER; note = 2-Prime-Fluoro modified nucleoside
  modified_base order(1..20,22..23,27,30..32): mod_base = OTHER; note = 2-Prime-O-Methyl modified nucleoside
  modified_base order(1^2,31^32): mod_base = OTHER; note = (1,3-dimethylimidazolidin-2-ylidene) Phosphoramidate linkage
  modified_base order(2..26,27..31): mod_base = OTHER; note = Phosphorothioate linkage
  modified_base 26^27: mod_base = OTHER; note = Methylphosphonate linkage
  misc_feature 1..32: note = RM110490

SEQ ID NO: 699 - DNA, 32 bp, synthetic construct; identical to SEQ ID NO: 129
  source 1..32: mol_type = other DNA
  misc_feature 22..23: note = DNA
  misc_feature order(1..21,24..32): note = RNA
  modified_base 21: mod_base = OTHER; note = 2-Prime-O-Methoxyethyl modified nucleoside
  modified_base 22: mod_base = OTHER; note = DNA nucleotide carrying a 6-amino-5-nitro-3-yl-2(1H)-pyridone nucleobase
  modified_base order(18,25..26): mod_base = OTHER; note = 2-Prime-Fluoro modified nucleoside
  modified_base order(1..17,19..20,24,27..32): mod_base = OTHER; note = 2-Prime-O-Methyl modified nucleoside
  modified_base order(1^2,31^32): mod_base = OTHER; note = (1,3-dimethylimidazolidin-2-ylidene) Phosphoramidate linkage
  modified_base order(2..23,24..31): mod_base = OTHER; note = Phosphorothioate linkage
  modified_base 23^24: mod_base = OTHER; note = Methylphosphonate linkage
  misc_feature 1..32: note = RM110491

SEQ ID NO: 700 - DNA, 32 bp, synthetic construct; identical to SEQ ID NO: 19
  source 1..32: mol_type = other DNA
  misc_feature 19..20: note = DNA
  misc_feature order(1..18,21..32): note = RNA
  modified_base 18: mod_base = OTHER; note = 2-Prime-O-Methoxyethyl modified nucleoside
  modified_base 19: mod_base = OTHER; note = DNA nucleotide carrying a 6-amino-5-nitro-3-yl-2(1H)-pyridone nucleobase
  modified_base order(15,22..23): mod_base = OTHER; note = 2-Prime-Fluoro modified nucleoside
  modified_base order(1..14,16..17,21,24..32): mod_base = OTHER; note = 2-Prime-O-Methyl modified nucleoside
  modified_base order(1^2,31^32): mod_base = OTHER; note = (1,3-dimethylimidazolidin-2-ylidene) Phosphoramidate linkage
  modified_base order(2..20,21..31): mod_base = OTHER; note = Phosphorothioate linkage
  modified_base 20^21: mod_base = OTHER; note = Methylphosphonate linkage
  misc_feature 1..32: note = RM110492

SEQ ID NO: 701 - DNA, 32 bp, synthetic construct; identical to SEQ ID NO: 131
  source 1..32: mol_type = other DNA
  misc_feature 16..17: note = DNA
  misc_feature order(1..15,18..32): note = RNA
  modified_base 15: mod_base = OTHER; note = 2-Prime-O-Methoxyethyl modified nucleoside
  modified_base 16: mod_base = OTHER; note = DNA nucleotide carrying a 6-amino-5-nitro-3-yl-2(1H)-pyridone nucleobase
  modified_base order(12,19..20): mod_base = OTHER; note = 2-Prime-Fluoro modified nucleoside
  modified_base order(1..11,13..14,18,21..32): mod_base = OTHER; note = 2-Prime-O-Methyl modified nucleoside
  modified_base order(1^2,31^32): mod_base = OTHER; note = (1,3-dimethylimidazolidin-2-ylidene) Phosphoramidate linkage
  modified_base order(2..17,18..31): mod_base = OTHER; note = Phosphorothioate linkage
  modified_base 17^18: mod_base = OTHER; note = Methylphosphonate linkage
  misc_feature 1..32: note = RM110493

SEQ ID NO: 702 - DNA, 32 bp, synthetic construct; identical to SEQ ID NO: 132
  source 1..32: mol_type = other DNA
  misc_feature 13..14: note = DNA
  misc_feature order(1..12,15..32): note = RNA
  modified_base 12: mod_base = OTHER; note = 2-Prime-O-Methoxyethyl modified nucleoside
  modified_base 13: mod_base = OTHER; note = DNA nucleotide carrying a 6-amino-5-nitro-3-yl-2(1H)-pyridone nucleobase
  modified_base order(9,16..17): mod_base = OTHER; note = 2-Prime-Fluoro modified nucleoside
  modified_base order(1..8,10..11,15,18..32): mod_base = OTHER; note = 2-Prime-O-Methyl modified nucleoside
  modified_base order(1^2,31^32): mod_base = OTHER; note = (1,3-dimethylimidazolidin-2-ylidene) Phosphoramidate linkage
  modified_base order(2..14,15..31): mod_base = OTHER; note = Phosphorothioate linkage
  modified_base 14^15: mod_base = OTHER; note = Methylphosphonate linkage
  misc_feature 1..32: note = RM110494

SEQ ID NO: 703 - DNA, 32 bp, synthetic construct; identical to SEQ ID NO: 133
  source 1..32: mol_type = other DNA
  misc_feature 10..11: note = DNA
  misc_feature order(1..9,12..32): note = RNA
  modified_base 9: mod_base = OTHER; note = 2-Prime-O-Methoxyethyl modified nucleoside
  modified_base 10: mod_base = OTHER; note = DNA nucleotide carrying a 6-amino-5-nitro-3-yl-2(1H)-pyridone nucleobase
  modified_base order(6,13..14): mod_base = OTHER; note = 2-Prime-Fluoro modified nucleoside
  modified_base order(1..5,7..8,12,15..32): mod_base = OTHER; note = 2-Prime-O-Methyl modified nucleoside
  modified_base order(1^2,31^32): mod_base = OTHER; note = (1,3-dimethylimidazolidin-2-ylidene) Phosphoramidate linkage
  modified_base order(2..11,12..31): mod_base = OTHER; note = Phosphorothioate linkage
  modified_base 11^12: mod_base = OTHER; note = Methylphosphonate linkage
  misc_feature 1..32: note = RM110495

SEQ ID NO: 704 - DNA, 32 bp, synthetic construct; identical to SEQ ID NO: 134
  source 1..32: mol_type = other DNA
  misc_feature 7..8: note = DNA
  misc_feature order(1..6,9..32): note = RNA
  modified_base 6: mod_base = OTHER; note = 2-Prime-O-Methoxyethyl modified nucleoside
  modified_base 7: mod_base = OTHER; note = DNA nucleotide carrying a 6-amino-5-nitro-3-yl-2(1H)-pyridone nucleobase
  modified_base order(3,10..11): mod_base = OTHER; note = 2-Prime-Fluoro modified nucleoside
  modified_base order(1..2,4..5,9,12..32): mod_base = OTHER; note = 2-Prime-O-Methyl modified nucleoside
  modified_base order(1^2,31^32): mod_base = OTHER; note = (1,3-dimethylimidazolidin-2-ylidene) Phosphoramidate linkage
  modified_base order(2..8,9..31): mod_base = OTHER; note = Phosphorothioate linkage
  modified_base 8^9: mod_base = OTHER; note = Methylphosphonate linkage
  misc_feature 1..32: note = RM110496

SEQ ID NO: 705 - DNA, 26 bp, synthetic construct
  source 1..26: mol_type = other DNA
  misc_feature 7..8: note = DNA
  misc_feature order(1..6,9..26): note = RNA
  modified_base 6: mod_base = OTHER; note = 2-Prime-O-Methoxyethyl modified nucleoside
  modified_base 7: mod_base = OTHER; note = DNA nucleotide carrying a 6-amino-5-nitro-3-yl-2(1H)-pyridone nucleobase
  modified_base order(3,10,12,18,20,23..24): mod_base = OTHER; note = 2-Prime-Fluoro modified nucleoside
  modified_base order(1..2,4..5,9,11,13..17,19,21..22,25..26): mod_base = OTHER; note = 2-Prime-O-Methyl modified nucleoside
  modified_base order(1^2,25^26): mod_base = OTHER; note = (1,3-dimethylimidazolidin-2-ylidene) Phosphoramidate linkage
  modified_base order(2..8,9..25): mod_base = OTHER; note = Phosphorothioate linkage
  modified_base 8^9: mod_base = OTHER; note = Methylphosphonate linkage
  misc_feature 1..26: note = RM110497
tgaggantgggttcatttttcttgtc

SEQ ID NO: 706 - DNA, 26 bp, synthetic construct
  source 1..26: mol_type = other DNA
  misc_feature 19..20: note = DNA
  misc_feature order(1..18,21..26): note = RNA
  modified_base 18: mod_base = OTHER; note = 2-Prime-O-Methoxyethyl modified nucleoside
  modified_base 19: mod_base = OTHER; note = DNA nucleotide carrying a 6-amino-5-nitro-3-yl-2(1H)-pyridone nucleobase
  modified_base order(4..5,8,10,16,22,25): mod_base = OTHER; note = 2-Prime-Fluoro modified nucleoside
  modified_base order(1..3,6..7,9,11..15,17,21,23..24,26): mod_base = OTHER; note = 2-Prime-O-Methyl modified nucleoside
  modified_base order(1^2,25^26): mod_base = OTHER; note = (1,3-dimethylimidazolidin-2-ylidene) Phosphoramidate linkage
  modified_base order(2..20,21..25): mod_base = OTHER; note = Phosphorothioate linkage
  modified_base 20^21: mod_base = OTHER; note = Methylphosphonate linkage
  misc_feature 1..26: note = RM110498
cggtcaaacctctgaggantgggttc

SEQ ID NO: 707 - DNA, 26 bp, synthetic construct
  source 1..26: mol_type = other DNA
  misc_feature 16..17: note = DNA
  misc_feature order(1..15,18..26): note = RNA
  modified_base 15: mod_base = OTHER; note = 2-Prime-O-Methoxyethyl modified nucleoside
  modified_base 16: mod_base = OTHER; note = DNA nucleotide carrying a 6-amino-5-nitro-3-yl-2(1H)-pyridone nucleobase
  modified_base order(1..2,5,7,13,19,22): mod_base = OTHER; note = 2-Prime-Fluoro modified nucleoside
  modified_base order(3..4,6,8..12,14,18,20..21,23..26): mod_base = OTHER; note = 2-Prime-O-Methyl modified nucleoside
  modified_base order(1^2,25^26): mod_base = OTHER; note = (1,3-dimethylimidazolidin-2-ylidene) Phosphoramidate linkage
  modified_base order(2..17,18..25): mod_base = OTHER; note = Phosphorothioate linkage
  modified_base 17^18: mod_base = OTHER; note = Methylphosphonate linkage
  misc_feature 1..26: note = RM110499
tcaaacctctgaggantgggttcatt

SEQ ID NO: 708 - DNA, 26 bp, synthetic construct
  source 1..26: mol_type = other DNA
  misc_feature 13..14: note = DNA
  misc_feature order(1..12,15..26): note = RNA
  modified_base 12: mod_base = OTHER; note = 2-Prime-O-Methoxyethyl modified nucleoside
  modified_base 13: mod_base = OTHER; note = DNA nucleotide carrying a 6-amino-5-nitro-3-yl-2(1H)-pyridone nucleobase
  modified_base order(9,16,18,24,26): mod_base = OTHER; note = 2-Prime-Fluoro modified nucleoside
  modified_base order(1..8,10..11,15,17,19..23,25): mod_base = OTHER; note = 2-Prime-O-Methyl modified nucleoside
  modified_base order(1^2,25^26): mod_base = OTHER; note = (1,3-dimethylimidazolidin-2-ylidene) Phosphoramidate linkage
  modified_base order(2..14,15..25): mod_base = OTHER; note = Phosphorothioate linkage
  modified_base 14^15: mod_base = OTHER; note = Methylphosphonate linkage
  misc_feature 1..26: note = RM110500
aacctctgaggantgggttcattttt

SEQ ID NO: 709 - DNA, 26 bp, synthetic construct
  source 1..26: mol_type = other DNA
  misc_feature 10..11: note = DNA
  misc_feature order(1..9,12..26): note = RNA
  modified_base 9: mod_base = OTHER; note = 2-Prime-O-Methoxyethyl modified nucleoside
  modified_base 10: mod_base = OTHER; note = DNA nucleotide carrying a 6-amino-5-nitro-3-yl-2(1H)-pyridone nucleobase
  modified_base order(6,13,15,21,23): mod_base = OTHER; note = 2-Prime-Fluoro modified nucleoside
  modified_base order(1..5,7..8,12,14,16..20,22,24..26): mod_base = OTHER; note = 2-Prime-O-Methyl modified nucleoside
  modified_base order(1^2,25^26): mod_base = OTHER; note = (1,3-dimethylimidazolidin-2-ylidene) Phosphoramidate linkage
  modified_base order(2..11,12..25): mod_base = OTHER; note = Phosphorothioate linkage
  modified_base 11^12: mod_base = OTHER; note = Methylphosphonate linkage
  misc_feature 1..26: note = RM110501
ctctgaggantgggttcatttttctt

SEQ ID NO: 710 - DNA, 26 bp, synthetic construct
  source 1..26: mol_type = other DNA
  misc_feature 7..8: note = DNA
  misc_feature order(1..6,9..26): note = RNA
  modified_base 6: mod_base = OTHER; note = 2-Prime-O-Methoxyethyl modified nucleoside
  modified_base 7: mod_base = OTHER; note = DNA nucleotide carrying a 6-amino-5-nitro-3-yl-2(1H)-pyridone nucleobase
  modified_base order(3,10,12,18,20): mod_base = OTHER; note = 2-Prime-Fluoro modified nucleoside
  modified_base order(1..2,4..5,9,11,13..17,19,21..26): mod_base = OTHER; note = 2-Prime-O-Methyl modified nucleoside
  modified_base order(1^2,25^26): mod_base = OTHER; note = (1,3-dimethylimidazolidin-2-ylidene) Phosphoramidate linkage
  modified_base order(2..8,9..25): mod_base = OTHER; note = Phosphorothioate linkage
  modified_base 8^9: mod_base = OTHER; note = Methylphosphonate linkage
  misc_feature 1..26: note = RM110502
tgaggantgggttcatttttcttgtc

SEQ ID NO: 711 - DNA, 29 bp, synthetic construct
  source 1..29: mol_type = other DNA
  misc_feature 15..16: note = DNA
  misc_feature order(1..14,17..29): note = RNA
  modified_base 14: mod_base = OTHER; note = 2-Prime-O-Methoxyethyl modified nucleoside
  modified_base 15: mod_base = OTHER; note = DNA nucleotide carrying a 6-amino-5-nitro-3-yl-2(1H)-pyridone nucleobase
  modified_base order(11,18,20,26,28): mod_base = OTHER; note = 2-Prime-Fluoro modified nucleoside
  modified_base order(1..10,12..13,17,19,21..25,27,29): mod_base = OTHER; note = 2-Prime-O-Methyl modified nucleoside
  modified_base order(1^2,28^29): mod_base = OTHER; note = (1,3-dimethylimidazolidin-2-ylidene) Phosphoramidate linkage
  modified_base order(2..16,17..28): mod_base = OTHER; note = Phosphorothioate linkage
  modified_base 16^17: mod_base = OTHER; note = Methylphosphonate linkage
  misc_feature 1..29: note = RM110503
caaacctctgaggantgggttcatttttc

SEQ ID NO: 712 - DNA, 29 bp, synthetic construct
  source 1..29: mol_type = other DNA
  misc_feature 12..13: note = DNA
  misc_feature order(1..11,14..29): note = RNA
  modified_base 11: mod_base = OTHER; note = 2-Prime-O-Methoxyethyl modified nucleoside
  modified_base 12: mod_base = OTHER; note = DNA nucleotide carrying a 6-amino-5-nitro-3-yl-2(1H)-pyridone nucleobase
  modified_base order(8,15,17,23,25): mod_base = OTHER; note = 2-Prime-Fluoro modified nucleoside
  modified_base order(1..7,9..10,14,16,18..22,24,26..29): mod_base = OTHER; note = 2-Prime-O-Methyl modified nucleoside
  modified_base order(1^2,28^29): mod_base = OTHER; note = (1,3-dimethylimidazolidin-2-ylidene) Phosphoramidate linkage
  modified_base order(2..13,14..28): mod_base = OTHER; note = Phosphorothioate linkage
  modified_base 13^14: mod_base = OTHER; note = Methylphosphonate linkage
  misc_feature 1..29: note = RM110504
acctctgaggantgggttcatttttcttg

SEQ ID NO: 713 - DNA, 29 bp, synthetic construct
  source 1..29: mol_type = other DNA
  misc_feature 9..10: note = DNA
  misc_feature order(1..8,11..29): note = RNA
  modified_base 8: mod_base = OTHER; note = 2-Prime-O-Methoxyethyl modified nucleoside
  modified_base 9: mod_base = OTHER; note = DNA nucleotide carrying a 6-amino-5-nitro-3-yl-2(1H)-pyridone nucleobase
  modified_base order(5,12,14,20,22): mod_base = OTHER; note = 2-Prime-Fluoro modified nucleoside
  modified_base order(1..4,6..7,11,13,15..19,21,23..29): mod_base = OTHER; note = 2-Prime-O-Methyl modified nucleoside
  modified_base order(1^2,28^29): mod_base = OTHER; note = (1,3-dimethylimidazolidin-2-ylidene) Phosphoramidate linkage
  modified_base order(2..10,11..28): mod_base = OTHER; note = Phosphorothioate linkage
  modified_base 10^11: mod_base = OTHER; note = Methylphosphonate linkage
  misc_feature 1..29: note = RM110505
tctgaggantgggttcatttttcttgtct

SEQ ID NO: 714 - DNA, 29 bp, synthetic construct
  source 1..29: mol_type = other DNA
  misc_feature 6..7: note = DNA
  misc_feature order(1..5,8..29): note = RNA
  modified_base 5: mod_base = OTHER; note = 2-Prime-O-Methoxyethyl modified nucleoside
  modified_base 6: mod_base = OTHER; note = DNA nucleotide carrying a 6-amino-5-nitro-3-yl-2(1H)-pyridone nucleobase
  modified_base order(2,9,11,17,19): mod_base = OTHER; note = 2-Prime-Fluoro modified nucleoside
  modified_base order(1,3..4,8,10,12..16,18,20..29): mod_base = OTHER; note = 2-Prime-O-Methyl modified nucleoside
  modified_base order(1^2,28^29): mod_base = OTHER; note = (1,3-dimethylimidazolidin-2-ylidene) Phosphoramidate linkage
  modified_base order(2..7,8..28): mod_base = OTHER; note = Phosphorothioate linkage
  modified_base 7^8: mod_base = OTHER; note = Methylphosphonate linkage
  misc_feature 1..29: note = RM110506
gaggantgggttcatttttcttgtctctt

SEQ ID NO: 715 - DNA, 26 bp, synthetic construct
  source 1..26: mol_type = other DNA
  misc_feature 19..20: note = DNA
  misc_feature order(1..18,21..26): note = RNA
  modified_base 18: mod_base = OTHER; note = 2-Prime-O-Methoxyethyl modified nucleoside
  modified_base 19: mod_base = OTHER; note = DNA nucleotide carrying a 6-amino-5-nitro-3-yl-2(1H)-pyridone nucleobase
  modified_base order(8,10,16,22,25): mod_base = OTHER; note = 2-Prime-Fluoro modified nucleoside
  modified_base order(1..7,9,11..15,17,21,23..24,26): mod_base = OTHER; note = 2-Prime-O-Methyl modified nucleoside
  modified_base order(1^2,25^26): mod_base = OTHER; note = (1,3-dimethylimidazolidin-2-ylidene) Phosphoramidate linkage
  modified_base order(2..20,21..25): mod_base = OTHER; note = Phosphorothioate linkage
  modified_base 20^21: mod_base = OTHER; note = Methylphosphonate linkage
  misc_feature 1..26: note = RM110507
cggtcaaacctctgaggantgggttc

SEQ ID NO: 716 - DNA, 26 bp, synthetic construct
  source 1..26: mol_type = other DNA
  misc_feature 16..17: note = DNA
  misc_feature order(1..15,18..26): note = RNA
  modified_base 15: mod_base = OTHER; note = 2-Prime-O-Methoxyethyl modified nucleoside
  modified_base 16: mod_base = OTHER; note = DNA nucleotide carrying a 6-amino-5-nitro-3-yl-2(1H)-pyridone nucleobase
  modified_base order(5,7,13,19,22): mod_base = OTHER; note = 2-Prime-Fluoro modified nucleoside
  modified_base order(1..4,6,8..12,14,18,20..21,23..26): mod_base = OTHER; note = 2-Prime-O-Methyl modified nucleoside
  modified_base order(1^2,25^26): mod_base = OTHER; note = (1,3-dimethylimidazolidin-2-ylidene) Phosphoramidate linkage
  modified_base order(2..17,18..25): mod_base = OTHER; note = Phosphorothioate linkage
  modified_base 17^18: mod_base = OTHER; note = Methylphosphonate linkage
  misc_feature 1..26: note = RM110508
tcaaacctctgaggantgggttcatt

SEQ ID NO: 717 - DNA, 26 bp, synthetic construct
  source 1..26: mol_type = other DNA
  misc_feature 13..14: note = DNA
  misc_feature order(1..12,15..26): note = RNA
  modified_base 12: mod_base = OTHER; note = 2-Prime-O-Methoxyethyl modified nucleoside
  modified_base 13: mod_base = OTHER; note = DNA nucleotide carrying a 6-amino-5-nitro-3-yl-2(1H)-pyridone nucleobase
  modified_base order(2,4,10,16,19): mod_base = OTHER; note = 2-Prime-Fluoro modified nucleoside
  modified_base order(1,3,5..9,11,15,17..18,20..26): mod_base = OTHER; note = 2-Prime-O-Methyl modified nucleoside
  modified_base order(1^2,25^26): mod_base = OTHER; note = (1,3-dimethylimidazolidin-2-ylidene) Phosphoramidate linkage
  modified_base order(2..14,15..25): mod_base = OTHER; note = Phosphorothioate linkage
  modified_base 14^15: mod_base = OTHER; note = Methylphosphonate linkage
  misc_feature 1..26: note = RM110509
aacctctgaggantgggttcattttt

SEQ ID NO: 718 - DNA, 29 bp, synthetic construct
  source 1..29: mol_type = other DNA
  misc_feature 21..22: note = DNA
  misc_feature order(1..20,23..29): note = RNA
  modified_base 20: mod_base = OTHER; note = 2-Prime-O-Methoxyethyl modified nucleoside
  modified_base 21: mod_base = OTHER; note = DNA nucleotide carrying a 6-amino-5-nitro-3-yl-2(1H)-pyridone nucleobase
  modified_base order(10,12,18,24,27): mod_base = OTHER; note = 2-Prime-Fluoro modified nucleoside
  modified_base order(1..9,11,13..17,19,23,25..26,28..29): mod_base = OTHER; note = 2-Prime-O-Methyl modified nucleoside
  modified_base order(1^2,28^29): mod_base = OTHER; note = (1,3-dimethylimidazolidin-2-ylidene) Phosphoramidate linkage
  modified_base order(2..22,23..28): mod_base = OTHER; note = Phosphorothioate linkage
  modified_base 22^23: mod_base = OTHER; note = Methylphosphonate linkage
  misc_feature 1..29: note = RM110510
ttcggtcaaacctctgaggantgggttca

SEQ ID NO: 719 - DNA, 29 bp, synthetic construct
  source 1..29: mol_type = other DNA
  misc_feature 18..19: note = DNA
  misc_feature order(1..17,20..29): note = RNA
  modified_base 17: mod_base = OTHER; note = 2-Prime-O-Methoxyethyl modified nucleoside
  modified_base 18: mod_base = OTHER; note = DNA nucleotide carrying a 6-amino-5-nitro-3-yl-2(1H)-pyridone nucleobase
  modified_base order(7,9,15,21,24): mod_base = OTHER; note = 2-Prime-Fluoro modified nucleoside
  modified_base order(1..6,8,10..14,16,20,22..23,25..29): mod_base = OTHER; note = 2-Prime-O-Methyl modified nucleoside
  modified_base order(1^2,28^29): mod_base = OTHER; note = (1,3-dimethylimidazolidin-2-ylidene) Phosphoramidate linkage
  modified_base order(2..19,20..28): mod_base = OTHER; note = Phosphorothioate linkage
  modified_base 19^20: mod_base = OTHER; note = Methylphosphonate linkage
  misc_feature 1..29: note = RM110511
ggtcaaacctctgaggantgggttcattt

SEQ ID NO: 720 - DNA, 29 bp, synthetic construct
  source 1..29: mol_type = other DNA
  misc_feature 15..16: note = DNA
  misc_feature order(1..14,17..29): note = RNA
  modified_base 14: mod_base = OTHER; note = 2-Prime-O-Methoxyethyl modified nucleoside
  modified_base 15: mod_base = OTHER; note = DNA nucleotide carrying a 6-amino-5-nitro-3-yl-2(1H)-pyridone nucleobase
  modified_base order(4,6,12,18,21): mod_base = OTHER; note = 2-Prime-Fluoro modified nucleoside
  modified_base order(1..3,5,7..11,13,17,19..20,22..29): mod_base = OTHER; note = 2-Prime-O-Methyl modified nucleoside
  modified_base order(1^2,28^29): mod_base = OTHER; note = (1,3-dimethylimidazolidin-2-ylidene) Phosphoramidate linkage
  modified_base order(2..16,17..28): mod_base = OTHER; note = Phosphorothioate linkage
  modified_base 16^17: mod_base = OTHER; note = Methylphosphonate linkage
  misc_feature 1..29: note = RM110512
caaacctctgaggantgggttcatttttc

SEQ ID NO: 721 - DNA, 29 bp, synthetic construct
  source 1..29: mol_type = other DNA
  misc_feature 12..13: note = DNA
  misc_feature order(1..11,14..29): note = RNA
  modified_base 11: mod_base = OTHER; note = 2-Prime-O-Methoxyethyl modified nucleoside
  modified_base 12: mod_base = OTHER; note = DNA nucleotide carrying a 6-amino-5-nitro-3-yl-2(1H)-pyridone nucleobase
  modified_base order(1,3,9,15,18): mod_base = OTHER; note = 2-Prime-Fluoro modified nucleoside
  modified_base order(2,4..8,10,14,16..17,19..29): mod_base = OTHER; note = 2-Prime-O-Methyl modified nucleoside
  modified_base order(1^2,28^29): mod_base = OTHER; note = (1,3-dimethylimidazolidin-2-ylidene) Phosphoramidate linkage
  modified_base order(2..13,14..28): mod_base = OTHER; note = Phosphorothioate linkage
  modified_base 13^14: mod_base = OTHER; note = Methylphosphonate linkage
  misc_feature 1..29: note = RM110513
acctctgaggantgggttcatttttcttg

SEQ ID NO: 722 - DNA, 26 bp, synthetic construct
  source 1..26: mol_type = other DNA
  misc_feature 16..17: note = DNA
  misc_feature order(1..15,18..26): note = RNA
  modified_base 15: mod_base = OTHER; note = 2-Prime-O-Methoxyethyl modified nucleoside
  modified_base 16: mod_base = OTHER; note = DNA nucleotide carrying a 6-amino-5-nitro-3-yl-2(1H)-pyridone nucleobase
  modified_base order(1..2,12,19..20,24..25): mod_base = OTHER; note = 2-Prime-Fluoro modified nucleoside
  modified_base order(3..11,13..14,18,21..23,26): mod_base = OTHER; note = 2-Prime-O-Methyl modified nucleoside
  modified_base order(1^2,25^26): mod_base = OTHER; note = (1,3-dimethylimidazolidin-2-ylidene) Phosphoramidate linkage
  modified_base order(2..17,18..25): mod_base = OTHER; note = Phosphorothioate linkage
  modified_base 17^18: mod_base = OTHER; note = Methylphosphonate linkage
  misc_feature 1..26: note = RM110514
tcaaacctctgaggantgggttcatt

SEQ ID NO: 723 - DNA, 26 bp, synthetic construct
  source 1..26: mol_type = other DNA
  misc_feature 16..17: note = DNA
  misc_feature order(1..15,18..26): note = RNA
  modified_base 15: mod_base = OTHER; note = 2-Prime-O-Methoxyethyl modified nucleoside
  modified_base 16: mod_base = OTHER; note = DNA nucleotide carrying a 6-amino-5-nitro-3-yl-2(1H)-pyridone nucleobase
  modified_base order(2,12,19..20,24): mod_base = OTHER; note = 2-Prime-Fluoro modified nucleoside
  modified_base order(1,3..11,13..14,18,21..23,25..26): mod_base = OTHER; note = 2-Prime-O-Methyl modified nucleoside
  modified_base order(1^2,25^26): mod_base = OTHER; note = (1,3-dimethylimidazolidin-2-ylidene) Phosphoramidate linkage
  modified_base order(2..17,18..25): mod_base = OTHER; note = Phosphorothioate linkage
  modified_base 17^18: mod_base = OTHER; note = Methylphosphonate linkage
  misc_feature 1..26: note = RM110515
tcaaacctctgaggantgggttcatt

SEQ ID NO: 724 - DNA, 29 bp, synthetic construct
  source 1..29: mol_type = other DNA
  misc_feature 21..22: note = DNA
  misc_feature order(1..20,23..29): note = RNA
  modified_base 20: mod_base = OTHER; note = 2-Prime-O-Methoxyethyl modified nucleoside
  modified_base 21: mod_base = OTHER; note = DNA nucleotide carrying a 6-amino-5-nitro-3-yl-2(1H)-pyridone nucleobase
  modified_base order(7,17,24..25,29): mod_base = OTHER; note = 2-Prime-Fluoro modified nucleoside
  modified_base order(1..6,8..16,18..19,23,26..28): mod_base = OTHER; note = 2-Prime-O-Methyl modified nucleoside
  modified_base order(1^2,28^29): mod_base = OTHER; note = (1,3-dimethylimidazolidin-2-ylidene) Phosphoramidate linkage
  modified_base order(2..22,23..28): mod_base = OTHER; note = Phosphorothioate linkage
  modified_base 22^23: mod_base = OTHER; note = Methylphosphonate linkage
  misc_feature 1..29: note = RM110516
ttcggtcaaacctctgaggantgggttca

SEQ ID NO: 725 - DNA, 29 bp, synthetic construct
  source 1..29: mol_type = other DNA
  misc_feature 18..19: note = DNA
  misc_feature order(1..17,20..29): note = RNA
  modified_base 17: mod_base = OTHER; note = 2-Prime-O-Methoxyethyl modified nucleoside
  modified_base 18: mod_base = OTHER; note = DNA nucleotide carrying a 6-amino-5-nitro-3-yl-2(1H)-pyridone nucleobase
  modified_base order(4,14,21..22,26): mod_base = OTHER; note = 2-Prime-Fluoro modified nucleoside
  modified_base order(1..3,5..13,15..16,20,23..25,27..29): mod_base = OTHER; note = 2-Prime-O-Methyl modified nucleoside
  modified_base order(1^2,28^29): mod_base = OTHER; note = (1,3-dimethylimidazolidin-2-ylidene) Phosphoramidate linkage
  modified_base order(2..19,20..28): mod_base = OTHER; note = Phosphorothioate linkage
  modified_base 19^20: mod_base = OTHER; note = Methylphosphonate linkage
  misc_feature 1..29: note = RM110517
ggtcaaacctctgaggantgggttcattt

SEQ ID NO: 726 - DNA, 29 bp, synthetic construct
  source 1..29: mol_type = other DNA
  misc_feature 15..16: note = DNA
  misc_feature order(1..14,17..29): note = RNA
  modified_base 14: mod_base = OTHER; note = 2-Prime-O-Methoxyethyl modified nucleoside
  modified_base 15: mod_base = OTHER; note = DNA nucleotide carrying a 6-amino-5-nitro-3-yl-2(1H)-pyridone nucleobase
  modified_base order(1,11,18..19,23): mod_base = OTHER; note = 2-Prime-Fluoro modified nucleoside
  modified_base order(2..10,12..13,17,20..22,24..29): mod_base = OTHER; note = 2-Prime-O-Methyl modified nucleoside
  modified_base order(1^2,28^29): mod_base = OTHER; note = (1,3-dimethylimidazolidin-2-ylidene) Phosphoramidate linkage
  modified_base order(2..16,17..28): mod_base = OTHER; note = Phosphorothioate linkage
  modified_base 16^17: mod_base = OTHER; note = Methylphosphonate linkage
  misc_feature 1..29: note = RM110518
caaacctctgaggantgggttcatttttc

SEQ ID NO: 727 - DNA, 26 bp, synthetic construct
  source 1..26: mol_type = other DNA
  misc_feature 10..11: note = DNA
  misc_feature order(1..9,12..26): note = RNA
  modified_base 9: mod_base = OTHER; note = 2-Prime-O-Methoxyethyl modified nucleoside
  modified_base 10: mod_base = OTHER; note = DNA nucleotide carrying a 6-amino-5-nitro-3-yl-2(1H)-pyridone nucleobase
  modified_base order(4,8,13,16,26): mod_base = OTHER; note = 2-Prime-Fluoro modified nucleoside
  modified_base order(1..3,5..7,12,14..15,17..25): mod_base = OTHER; note = 2-Prime-O-Methyl modified nucleoside
  modified_base order(1^2,25^26): mod_base = OTHER; note = (1,3-dimethylimidazolidin-2-ylidene) Phosphoramidate linkage
  modified_base order(2..11,12..25): mod_base = OTHER; note = Phosphorothioate linkage
  modified_base 11^12: mod_base = OTHER; note = Methylphosphonate linkage
  misc_feature 1..26: note = RM110519
ctctgaggantgggttcatttttctt

SEQ ID NO: 728 - DNA, 26 bp, synthetic construct
  source 1..26: mol_type = other DNA
  misc_feature 7..8: note = DNA
  misc_feature order(1..6,9..26): note = RNA
  modified_base 6: mod_base = OTHER; note = 2-Prime-O-Methoxyethyl modified nucleoside
  modified_base 7: mod_base = OTHER; note = DNA nucleotide carrying a 6-amino-5-nitro-3-yl-2(1H)-pyridone nucleobase
  modified_base order(1,5,10,13,23): mod_base = OTHER; note = 2-Prime-Fluoro modified nucleoside
  modified_base order(2..4,9,11..12,14..22,24..26): mod_base = OTHER; note = 2-Prime-O-Methyl modified nucleoside
  modified_base order(1^2,25^26): mod_base = OTHER; note = (1,3-dimethylimidazolidin-2-ylidene) Phosphoramidate linkage
  modified_base order(2..8,9..25): mod_base = OTHER; note = Phosphorothioate linkage
  modified_base 8^9: mod_base = OTHER; note = Methylphosphonate linkage
  misc_feature 1..26: note = RM110520
tgaggantgggttcatttttcttgtc

SEQ ID NO: 729 - DNA, 29 bp, synthetic construct
  source 1..29: mol_type = other DNA
  misc_feature 12..13: note = DNA
  misc_feature order(1..11,14..29): note = RNA
  modified_base 11: mod_base = OTHER; note = 2-Prime-O-Methoxyethyl modified nucleoside
  modified_base 12: mod_base = OTHER; note = DNA nucleotide carrying a 6-amino-5-nitro-3-yl-2(1H)-pyridone nucleobase
  modified_base order(6,10,15,18,28): mod_base = OTHER; note = 2-Prime-Fluoro modified nucleoside
  modified_base order(1..5,7..9,14,16..17,19..27,29): mod_base = OTHER; note = 2-Prime-O-Methyl modified nucleoside
  modified_base order(1^2,28^29): mod_base = OTHER; note = (1,3-dimethylimidazolidin-2-ylidene) Phosphoramidate linkage
  modified_base order(2..13,14..28): mod_base = OTHER; note = Phosphorothioate linkage
  modified_base 13^14: mod_base = OTHER; note = Methylphosphonate linkage
  misc_feature 1..29: note = RM110521
acctctgaggantgggttcatttttcttg

SEQ ID NO: 730 - DNA, 29 bp, synthetic construct
  source 1..29: mol_type = other DNA
  misc_feature 9..10: note = DNA
  misc_feature order(1..8,11..29): note = RNA
  modified_base 8: mod_base = OTHER; note = 2-Prime-O-Methoxyethyl modified nucleoside
  modified_base 9: mod_base = OTHER; note = DNA nucleotide carrying a 6-amino-5-nitro-3-yl-2(1H)-pyridone nucleobase
  modified_base order(3,7,12,15,25): mod_base = OTHER; note = 2-Prime-Fluoro modified nucleoside
  modified_base order(1..2,4..6,11,13..14,16..24,26..29): mod_base = OTHER; note = 2-Prime-O-Methyl modified nucleoside
  modified_base order(1^2,28^29): mod_base = OTHER; note = (1,3-dimethylimidazolidin-2-ylidene) Phosphoramidate linkage
  modified_base order(2..10,11..28): mod_base = OTHER; note = Phosphorothioate linkage
  modified_base 10^11: mod_base = OTHER; note = Methylphosphonate linkage
  misc_feature 1..29: note = RM110522
tctgaggantgggttcatttttcttgtct

SEQ ID NO: 731 - DNA, 32 bp, synthetic construct; identical to SEQ ID NO: 128
  source 1..32: mol_type = other DNA
  misc_feature 25..26: note = DNA
  misc_feature order(1..24,27..32): note = RNA
  modified_base 24: mod_base = OTHER; note = 2-Prime-O-Methoxyethyl modified nucleoside
  modified_base 25: mod_base = OTHER; note = DNA nucleotide carrying a 6-amino-5-nitro-3-yl-2(1H)-pyridone nucleobase
  modified_base order(9,12,21,28,31..32): mod_base = OTHER; note = 2-Prime-Fluoro modified nucleoside
  modified_base order(1..8,10..11,13..20,22..23,27,29..30): mod_base = OTHER; note = 2-Prime-O-Methyl modified nucleoside
  modified_base order(1^2,31^32): mod_base = OTHER; note = (1,3-dimethylimidazolidin-2-ylidene) Phosphoramidate linkage
  modified_base order(2..26,27..31): mod_base = OTHER; note = Phosphorothioate linkage
  modified_base 26^27: mod_base = OTHER; note = Methylphosphonate linkage
  misc_feature 1..32: note = RM110523

SEQ ID NO: 732 - DNA, 32 bp, synthetic construct; identical to SEQ ID NO: 129
  source 1..32: mol_type = other DNA
  misc_feature 22..23: note = DNA
  misc_feature order(1..21,24..32): note = RNA
  modified_base 21: mod_base = OTHER; note = 2-Prime-O-Methoxyethyl modified nucleoside
  modified_base 22: mod_base = OTHER; note = DNA nucleotide carrying a 6-amino-5-nitro-3-yl-2(1H)-pyridone nucleobase
  modified_base order(6,9,18,25,28..29): mod_base = OTHER; note = 2-Prime-Fluoro modified nucleoside
  modified_base order(1..5,7..8,10..17,19..20,24,26..27,30..32): mod_base = OTHER; note = 2-Prime-O-Methyl modified nucleoside
  modified_base order(1^2,31^32): mod_base = OTHER; note = (1,3-dimethylimidazolidin-2-ylidene) Phosphoramidate linkage
  modified_base order(2..23,24..31): mod_base = OTHER; note = Phosphorothioate linkage
  modified_base 23^24: mod_base = OTHER; note = Methylphosphonate linkage
  misc_feature 1..32: note = RM110524

SEQ ID NO: 733 - DNA, 32 bp, synthetic construct; identical to SEQ ID NO: 19
  source 1..32: mol_type = other DNA
  misc_feature 19..20: note = DNA
  misc_feature order(1..18,21..32): note = RNA
  modified_base 18: mod_base = OTHER; note = 2-Prime-O-Methoxyethyl modified nucleoside
  modified_base 19: mod_base = OTHER; note = DNA nucleotide carrying a 6-amino-5-nitro-3-yl-2(1H)-pyridone nucleobase
  modified_base order(3,6,15,22,25..26): mod_base = OTHER; note = 2-Prime-Fluoro modified nucleoside
  modified_base order(1..2,4..5,7..14,16..17,21,23..24,27..32): mod_base = OTHER; note = 2-Prime-O-Methyl modified nucleoside
  modified_base order(1^2,31^32): mod_base = OTHER; note = (1,3-dimethylimidazolidin-2-ylidene) Phosphoramidate linkage
  modified_base order(2..20,21..31): mod_base = OTHER; note = Phosphorothioate linkage
  modified_base 20^21: mod_base = OTHER; note = Methylphosphonate linkage
  misc_feature 1..32: note = RM110525

SEQ ID NO: 734 - DNA, 32 bp, synthetic construct; identical to SEQ ID NO: 132
  source 1..32: mol_type = other DNA
  misc_feature 13..14: note = DNA
  misc_feature order(1..12,15..32): note = RNA
  modified_base 12: mod_base = OTHER; note = 2-Prime-O-Methoxyethyl modified nucleoside
  modified_base 13: mod_base = OTHER; note = DNA nucleotide carrying a 6-amino-5-nitro-3-yl-2(1H)-pyridone nucleobase
  modified_base order(8..9,16,19,28,31): mod_base = OTHER; note = 2-Prime-Fluoro modified nucleoside
  modified_base order(1..7,10..11,15,17..18,20..27,29..30,32): mod_base = OTHER; note = 2-Prime-O-Methyl modified nucleoside
  modified_base order(1^2,31^32): mod_base = OTHER; note = (1,3-dimethylimidazolidin-2-ylidene) Phosphoramidate linkage
  modified_base order(2..14,15..31): mod_base = OTHER; note = Phosphorothioate linkage
  modified_base 14^15: mod_base = OTHER; note = Methylphosphonate linkage
  misc_feature 1..32: note = RM110526

SEQ ID NO: 735 - DNA, 32 bp, synthetic construct; identical to SEQ ID NO: 133
  source 1..32: mol_type = other DNA
  misc_feature 10..11: note = DNA
  misc_feature order(1..9,12..32): note = RNA
  modified_base 9: mod_base = OTHER; note = 2-Prime-O-Methoxyethyl modified nucleoside
  modified_base 10: mod_base = OTHER; note = DNA nucleotide carrying a 6-amino-5-nitro-3-yl-2(1H)-pyridone nucleobase
  modified_base order(5..6,13,16,25,28): mod_base = OTHER; note = 2-Prime-Fluoro modified nucleoside
  modified_base order(1..4,7..8,12,14..15,17..24,26..27,29..32): mod_base = OTHER; note = 2-Prime-O-Methyl modified nucleoside
  modified_base order(1^2,31^32): mod_base = OTHER; note = (1,3-dimethylimidazolidin-2-ylidene) Phosphoramidate linkage
  modified_base order(2..11,12..31): mod_base = OTHER; note = Phosphorothioate linkage
  modified_base 11^12: mod_base = OTHER; note = Methylphosphonate linkage
  misc_feature 1..32: note = RM110527

SEQ ID NO: 736 - DNA, 32 bp, synthetic construct; identical to SEQ ID NO: 134
  source 1..32: mol_type = other DNA
  misc_feature 7..8: note = DNA
  misc_feature order(1..6,9..32): note = RNA
  modified_base 6: mod_base = OTHER; note = 2-Prime-O-Methoxyethyl modified nucleoside
  modified_base 7: mod_base = OTHER; note = DNA nucleotide carrying a 6-amino-5-nitro-3-yl-2(1H)-pyridone nucleobase
  modified_base order(2..3,10,13,22,25): mod_base = OTHER; note = 2-Prime-Fluoro modified nucleoside
  modified_base order(1,4..5,9,11..12,14..21,23..24,26..32): mod_base = OTHER; note = 2-Prime-O-Methyl modified nucleoside
  modified_base order(1^2,31^32): mod_base = OTHER; note = (1,3-dimethylimidazolidin-2-ylidene) Phosphoramidate linkage
  modified_base order(2..8,9..31): mod_base = OTHER; note = Phosphorothioate linkage
  modified_base 8^9: mod_base = OTHER; note = Methylphosphonate linkage
  misc_feature 1..32: note = RM110528

SEQ ID NO: 737 - DNA, 23 bp, synthetic construct
  source 1..23: mol_type = other DNA
  misc_feature 18..19: note = DNA
  misc_feature order(1..17,20..23): note = RNA
  modified_base 17: mod_base = OTHER; note = 2-Prime-O-Methoxyethyl modified nucleoside
  modified_base 18: mod_base = OTHER; note = DNA nucleotide carrying a 6-amino-5-nitro-3-yl-2(1H)-pyridone nucleobase
  modified_base order(2,5,14,21): mod_base = OTHER; note = 2-Prime-Fluoro modified nucleoside
  modified_base order(1,3..4,6..13,15..16,20,22..23): mod_base = OTHER; note = 2-Prime-O-Methyl modified nucleoside
  modified_base order(1^2,22^23): mod_base = OTHER; note = (1,3-dimethylimidazolidin-2-ylidene) Phosphoramidate linkage
  modified_base order(2..19,20..22): mod_base = OTHER; note = Phosphorothioate linkage
  modified_base 19^20: mod_base = OTHER; note = Methylphosphonate linkage
  misc_feature 1..23: note = RM110529
ggtcaaacctctgaggantgggt

SEQ ID NO: 738 - DNA, 29 bp, synthetic construct
  source 1..29: mol_type = other DNA
  misc_feature 21..22: note = DNA
  misc_feature order(1..20,23..29): note = RNA
  modified_base 20: mod_base = OTHER; note = 2-Prime-O-Methoxyethyl modified nucleoside
  modified_base 21: mod_base = OTHER; note = DNA nucleotide carrying a 6-amino-5-nitro-3-yl-2(1H)-pyridone nucleobase
  modified_base order(3,6..7,10,16,19,24,28): mod_base = OTHER; note = 2-Prime-Fluoro modified nucleoside
  modified_base order(1..2,4..5,8..9,11..15,17..18,23,25..27,29): mod_base = OTHER; note = 2-Prime-O-Methyl modified nucleoside
  modified_base order(1^2,28^29): mod_base = OTHER; note = (1,3-dimethylimidazolidin-2-ylidene) Phosphoramidate linkage
  modified_base order(2..22,23..28): mod_base = OTHER; note = Phosphorothioate linkage
  modified_base 22^23: mod_base = OTHER; note = Methylphosphonate linkage
  misc_feature 1..29: note = RM110530
ttcggtcaaacctctgaggantgggttca

SEQ ID NO: 739 - DNA, 29 bp, synthetic construct
  source 1..29: mol_type = other DNA
  misc_feature 9..10: note = DNA
  misc_feature order(1..8,11..29): note = RNA
  modified_base 8: mod_base = OTHER; note = 2-Prime-O-Methoxyethyl modified nucleoside
  modified_base 9: mod_base = OTHER; note = DNA nucleotide carrying a 6-amino-5-nitro-3-yl-2(1H)-pyridone nucleobase
  modified_base order(4,12..13,16,22,25..26,29): mod_base = OTHER; note = 2-Prime-Fluoro modified nucleoside
  modified_base order(1..3,5..7,11,14..15,17..21,23..24,27..28): mod_base = OTHER; note = 2-Prime-O-Methyl modified nucleoside
  modified_base order(1^2,28^29): mod_base = OTHER; note = (1,3-dimethylimidazolidin-2-ylidene) Phosphoramidate linkage
  modified_base order(2..10,11..28): mod_base = OTHER; note = Phosphorothioate linkage
  modified_base 10^11: mod_base = OTHER; note = Methylphosphonate linkage
  misc_feature 1..29: note = RM110531
tctgaggantgggttcatttttcttgtct

SEQ ID NO: 740 - DNA, 29 bp, synthetic construct
  source 1..29: mol_type = other DNA
  misc_feature 6..7: note = DNA
  misc_feature order(1..5,8..29): note = RNA
  modified_base 5: mod_base = OTHER; note = 2-Prime-O-Methoxyethyl modified nucleoside
  modified_base 6: mod_base = OTHER; note = DNA nucleotide carrying a 6-amino-5-nitro-3-yl-2(1H)-pyridone nucleobase
  modified_base order(1,9..10,13,19,22..23,26): mod_base = OTHER; note = 2-Prime-Fluoro modified nucleoside
  modified_base order(2..4,8,11..12,14..18,20..21,24..25,27..29): mod_base = OTHER; note = 2-Prime-O-Methyl modified nucleoside
  modified_base order(1^2,28^29): mod_base = OTHER; note = (1,3-dimethylimidazolidin-2-ylidene) Phosphoramidate linkage
  modified_base order(2..7,8..28): mod_base = OTHER; note = Phosphorothioate linkage
  modified_base 7^8: mod_base = OTHER; note = Methylphosphonate linkage
  misc_feature 1..29: note = RM110532
gaggantgggttcatttttcttgtctctt

SEQ ID NO: 741 - DNA, 26 bp, synthetic construct
  source 1..26: mol_type = other DNA
  misc_feature 19..20: note = DNA
  misc_feature order(1..18,21..26): note = RNA
  modified_base 18: mod_base = OTHER; note = 2-Prime-O-Methoxyethyl modified nucleoside
  modified_base 19: mod_base = OTHER; note = DNA nucleotide carrying a 6-amino-5-nitro-3-yl-2(1H)-pyridone nucleobase
  modified_base order(8,14,17,22,26): mod_base = OTHER; note = 2-Prime-Fluoro modified nucleoside
  modified_base order(1..7,9..13,15..16,21,23..25): mod_base = OTHER; note = 2-Prime-O-Methyl modified nucleoside
  modified_base order(1^2,25^26): mod_base = OTHER; note = (1,3-dimethylimidazolidin-2-ylidene) Phosphoramidate linkage
  modified_base order(2..20,21..25): mod_base = OTHER; note = Phosphorothioate linkage
  modified_base 20^21: mod_base = OTHER; note = Methylphosphonate linkage
  misc_feature 1..26: note = RM110533
cggtcaaacctctgaggantgggttc

SEQ ID NO: 742 - DNA, 26 bp, synthetic construct
  source 1..26: mol_type = other DNA
  misc_feature 16..17: note = DNA
  misc_feature order(1..15,18..26): note = RNA
  modified_base 15: mod_base = OTHER; note = 2-Prime-O-Methoxyethyl modified nucleoside
  modified_base 16: mod_base = OTHER; note = DNA nucleotide carrying a 6-amino-5-nitro-3-yl-2(1H)-pyridone nucleobase
  modified_base order(5,11,14,19,23): mod_base = OTHER; note = 2-Prime-Fluoro modified nucleoside
  modified_base order(1..4,6..10,12..13,18,20..22,24..26): mod_base = OTHER; note = 2-Prime-O-Methyl modified nucleoside
  modified_base order(1^2,25^26): mod_base = OTHER; note = (1,3-dimethylimidazolidin-2-ylidene) Phosphoramidate linkage
  modified_base order(2..17,18..25): mod_base = OTHER; note = Phosphorothioate linkage
  modified_base 17^18: mod_base = OTHER; note = Methylphosphonate linkage
  misc_feature 1..26: note = RM110534
tcaaacctctgaggantgggttcatt

SEQ ID NO: 743 - DNA, 26 bp, synthetic construct
  source 1..26: mol_type = other DNA
  misc_feature 13..14: note = DNA
  misc_feature order(1..12,15..26): note = RNA
  modified_base 12: mod_base = OTHER; note = 2-Prime-O-Methoxyethyl modified nucleoside
  modified_base 13: mod_base = OTHER; note = DNA nucleotide carrying a 6-amino-5-nitro-3-yl-2(1H)-pyridone nucleobase
  modified_base order(2,8,11,16,20): mod_base = OTHER; note = 2-Prime-Fluoro modified nucleoside
  modified_base order(1,3..7,9..10,15,17..19,21..26): mod_base = OTHER; note = 2-Prime-O-Methyl modified nucleoside
  modified_base order(1^2,25^26): mod_base = OTHER; note = (1,3-dimethylimidazolidin-2-ylidene) Phosphoramidate linkage
  modified_base order(2..14,15..25): mod_base = OTHER; note = Phosphorothioate linkage
  modified_base 14^15: mod_base = OTHER; note = Methylphosphonate linkage
  misc_feature 1..26: note = RM110535
aacctctgaggantgggttcattttt

SEQ ID NO: 744 - DNA, 29 bp, synthetic construct
  source 1..29: mol_type = other DNA
  misc_feature 21..22: note = DNA
  misc_feature order(1..20,23..29): note = RNA
  modified_base 20: mod_base = OTHER; note = 2-Prime-O-Methoxyethyl modified nucleoside
  modified_base 21: mod_base = OTHER; note = DNA nucleotide carrying a 6-amino-5-nitro-3-yl-2(1H)-pyridone nucleobase
  modified_base order(10,16,19,24,28): mod_base = OTHER; note = 2-Prime-Fluoro modified nucleoside
  modified_base order(1..9,11..15,17..18,23,25..27,29): mod_base = OTHER; note = 2-Prime-O-Methyl modified nucleoside
  modified_base order(1^2,28^29): mod_base = OTHER; note = (1,3-dimethylimidazolidin-2-ylidene) Phosphoramidate linkage
  modified_base order(2..22,23..28): mod_base = OTHER; note = Phosphorothioate linkage
  modified_base 22^23: mod_base = OTHER; note = Methylphosphonate linkage
  misc_feature 1..29: note = RM110536
ttcggtcaaacctctgaggantgggttca

SEQ ID NO: 745 - DNA, 29 bp, synthetic construct
  source 1..29: mol_type = other DNA
  misc_feature 18..19: note = DNA
  misc_feature order(1..17,20..29): note = RNA
  modified_base 17: mod_base = OTHER; note = 2-Prime-O-Methoxyethyl modified nucleoside
  modified_base 18: mod_base = OTHER; note = DNA nucleotide carrying a 6-amino-5-nitro-3-yl-2(1H)-pyridone nucleobase
  modified_base order(7,13,16,21,25): mod_base = OTHER; note = 2-Prime-Fluoro modified nucleoside
  modified_base order(1..6,8..12,14..15,20,22..24,26..29): mod_base = OTHER; note = 2-Prime-O-Methyl modified nucleoside
  modified_base order(1^2,28^29): mod_base = OTHER; note = (1,3-dimethylimidazolidin-2-ylidene) Phosphoramidate linkage
  modified_base order(2..19,20..28): mod_base = OTHER; note = Phosphorothioate linkage
  modified_base 19^20: mod_base = OTHER; note = Methylphosphonate linkage
  misc_feature 1..29: note = RM110537
ggtcaaacctctgaggantgggttcattt

SEQ ID NO: 746 - DNA, 29 bp, synthetic construct
  source 1..29: mol_type = other DNA
  misc_feature 15..16: note = DNA
  misc_feature order(1..14,17..29): note = RNA
  modified_base 14: mod_base = OTHER; note = 2-Prime-O-Methoxyethyl modified nucleoside
  modified_base 15: mod_base = OTHER; note = DNA nucleotide carrying a 6-amino-5-nitro-3-yl-2(1H)-pyridone nucleobase
  modified_base order(4,10,13,18,22): mod_base = OTHER; note = 2-Prime-Fluoro modified nucleoside
  modified_base order(1..3,5..9,11..12,17,19..21,23..29): mod_base = OTHER; note = 2-Prime-O-Methyl modified nucleoside
  modified_base order(1^2,28^29): mod_base = OTHER; note = (1,3-dimethylimidazolidin-2-ylidene) Phosphoramidate linkage
  modified_base order(2..16,17..28): mod_base = OTHER; note = Phosphorothioate linkage
  modified_base 16^17: mod_base = OTHER; note = Methylphosphonate linkage
  misc_feature 1..29: note = RM110538
caaacctctgaggantgggttcatttttc

SEQ ID NO: 747 - DNA, 29 bp, synthetic construct
  source 1..29: mol_type = other DNA
  misc_feature 12..13: note = DNA
  misc_feature order(1..11,14..29): note = RNA
  modified_base 11: mod_base = OTHER; note = 2-Prime-O-Methoxyethyl modified nucleoside
  modified_base 12: mod_base = OTHER; note = DNA nucleotide carrying a 6-amino-5-nitro-3-yl-2(1H)-pyridone nucleobase
  modified_base order(1,7,10,15,19): mod_base = OTHER; note = 2-Prime-Fluoro modified nucleoside
  modified_base order(2..6,8..9,14,16..18,20..29): mod_base = OTHER; note = 2-Prime-O-Methyl modified nucleoside
  modified_base order(1^2,28^29): mod_base = OTHER; note = (1,3-dimethylimidazolidin-2-ylidene) Phosphoramidate linkage
  modified_base order(2..13,14..28): mod_base = OTHER; note = Phosphorothioate linkage
  modified_base 13^14: mod_base = OTHER; note = Methylphosphonate linkage
  misc_feature 1..29: note = RM110539
acctctgaggantgggttcatttttcttg

SEQ ID NO: 748 - DNA, 26 bp, synthetic construct
  source 1..26: mol_type = other DNA
  misc_feature 13..14: note = DNA
  misc_feature order(1..12,15..26): note = RNA
  modified_base 12: mod_base = OTHER; note = 2-Prime-O-Methoxyethyl modified nucleoside
  modified_base 13: mod_base = OTHER; note = DNA nucleotide carrying a 6-amino-5-nitro-3-yl-2(1H)-pyridone nucleobase
  modified_base order(8,16..17,20,26): mod_base = OTHER; note = 2-Prime-Fluoro modified nucleoside
  modified_base order(1..7,9..11,15,18..19,21..25): mod_base = OTHER; note = 2-Prime-O-Methyl modified nucleoside
  modified_base order(1^2,25^26): mod_base = OTHER; note = (1,3-dimethylimidazolidin-2-ylidene) Phosphoramidate linkage
  modified_base order(2..14,15..25): mod_base = OTHER; note = Phosphorothioate linkage
  modified_base 14^15: mod_base = OTHER; note = Methylphosphonate linkage
  misc_feature 1..26: note = RM110540
aacctctgaggantgggttcattttt

SEQ ID NO: 749 - DNA, 26 bp, synthetic construct
  source 1..26: mol_type = other DNA
  misc_feature 10..11: note = DNA
  misc_feature order(1..9,12..26): note = RNA
  modified_base 9: mod_base = OTHER; note = 2-Prime-O-Methoxyethyl modified nucleoside
  modified_base 10: mod_base = OTHER; note = DNA nucleotide carrying a 6-amino-5-nitro-3-yl-2(1H)-pyridone nucleobase
  modified_base order(5,13..14,17,23): mod_base = OTHER; note = 2-Prime-Fluoro modified nucleoside
  modified_base order(1..4,6..8,12,15..16,18..22,24..26): mod_base = OTHER; note = 2-Prime-O-Methyl modified nucleoside
  modified_base order(1^2,25^26): mod_base = OTHER; note = (1,3-dimethylimidazolidin-2-ylidene) Phosphoramidate linkage
  modified_base order(2..11,12..25): mod_base = OTHER; note = Phosphorothioate linkage
  modified_base 11^12: mod_base = OTHER; note = Methylphosphonate linkage
  misc_feature 1..26: note = RM110541
ctctgaggantgggttcatttttctt

SEQ ID NO: 750 - DNA, 26 bp, synthetic construct
  source 1..26: mol_type = other DNA
  misc_feature 7..8: note = DNA
  misc_feature order(1..6,9..26): note = RNA
  modified_base 6: mod_base = OTHER; note = 2-Prime-O-Methoxyethyl modified nucleoside
  modified_base 7: mod_base = OTHER; note = DNA nucleotide carrying a 6-amino-5-nitro-3-yl-2(1H)-pyridone nucleobase
  modified_base order(2,10..11,14,20): mod_base = OTHER; note = 2-Prime-Fluoro modified nucleoside
  modified_base order(1,3..5,9,12..13,15..19,21..26): mod_base = OTHER; note = 2-Prime-O-Methyl modified nucleoside
  modified_base order(1^2,25^26): mod_base = OTHER; note = (1,3-dimethylimidazolidin-2-ylidene) Phosphoramidate linkage
  modified_base order(2..8,9..25): mod_base = OTHER; note = Phosphorothioate linkage
  modified_base 8^9: mod_base = OTHER; note = Methylphosphonate linkage
  misc_feature 1..26: note = RM110542
tgaggantgggttcatttttcttgtc

SEQ ID NO: 751 - DNA, 29 bp, synthetic construct
  source 1..29: mol_type = other DNA
  misc_feature 15..16: note = DNA
  misc_feature order(1..14,17..29): note = RNA
  modified_base 14: mod_base = OTHER; note = 2-Prime-O-Methoxyethyl modified nucleoside
  modified_base 15: mod_base = OTHER; note = DNA nucleotide carrying a 6-amino-5-nitro-3-yl-2(1H)-pyridone nucleobase
  modified_base order(10,18..19,22,28): mod_base = OTHER; note = 2-Prime-Fluoro modified nucleoside
  modified_base order(1..9,11..13,17,20..21,23..27,29): mod_base = OTHER; note = 2-Prime-O-Methyl modified nucleoside
  modified_base order(1^2,28^29): mod_base = OTHER; note = (1,3-dimethylimidazolidin-2-ylidene) Phosphoramidate linkage
  modified_base order(2..16,17..28): mod_base = OTHER; note = Phosphorothioate linkage
  modified_base 16^17: mod_base = OTHER; note = Methylphosphonate linkage
  misc_feature 1..29: note = RM110543
caaacctctgaggantgggttcatttttc

SEQ ID NO: 752 - DNA, 29 bp, synthetic construct
  source 1..29: mol_type = other DNA
  misc_feature 12..13: note = DNA
  misc_feature order(1..11,14..29): note = RNA
  modified_base 11: mod_base = OTHER; note = 2-Prime-O-Methoxyethyl modified nucleoside
  modified_base 12: mod_base = OTHER; note = DNA nucleotide carrying a 6-amino-5-nitro-3-yl-2(1H)-pyridone nucleobase
  modified_base order(7,15..16,19,25): mod_base = OTHER; note = 2-Prime-Fluoro modified nucleoside
  modified_base order(1..6,8..10,14,17..18,20..24,26..29): mod_base = OTHER; note = 2-Prime-O-Methyl modified nucleoside
  modified_base order(1^2,28^29): mod_base = OTHER; note = (1,3-dimethylimidazolidin-2-ylidene) Phosphoramidate linkage
  modified_base order(2..13,14..28): mod_base = OTHER; note = Phosphorothioate linkage
  modified_base 13^14: mod_base = OTHER; note = Methylphosphonate linkage
  misc_feature 1..29: note = RM110544
acctctgaggantgggttcatttttcttg

SEQ ID NO: 753 - DNA, 29 bp, synthetic construct
  source 1..29: mol_type = other DNA
  misc_feature 9..10: note = DNA
  misc_feature order(1..8,11..29): note = RNA
  modified_base 8: mod_base = OTHER; note = 2-Prime-O-Methoxyethyl modified nucleoside
  modified_base 9: mod_base = OTHER; note = DNA nucleotide carrying a 6-amino-5-nitro-3-yl-2(1H)-pyridone nucleobase
  modified_base order(4,12..13,16,22): mod_base = OTHER; note = 2-Prime-Fluoro modified nucleoside
  modified_base order(1..3,5..7,11,14..15,17..21,23..29): mod_base = OTHER; note = 2-Prime-O-Methyl modified nucleoside
  modified_base order(1^2,28^29): mod_base = OTHER; note = (1,3-dimethylimidazolidin-2-ylidene) Phosphoramidate linkage
  modified_base order(2..10,11..28): mod_base = OTHER; note = Phosphorothioate linkage
  modified_base 10^11: mod_base = OTHER; note = Methylphosphonate linkage
  misc_feature 1..29: note = RM110545
tctgaggantgggttcatttttcttgtct

SEQ ID NO: 754 - DNA, 29 bp, synthetic construct
  source 1..29: mol_type = other DNA
  misc_feature 6..7: note = DNA
  misc_feature order(1..5,8..29): note = RNA
  modified_base 5: mod_base = OTHER; note = 2-Prime-O-Methoxyethyl modified nucleoside
  modified_base 6: mod_base = OTHER; note = DNA nucleotide carrying a 6-amino-5-nitro-3-yl-2(1H)-pyridone nucleobase
  modified_base order(1,9..10,13,19): mod_base = OTHER; note = 2-Prime-Fluoro modified nucleoside
  modified_base order(2..4,8,11..12,14..18,20..29): mod_base = OTHER; note = 2-Prime-O-Methyl modified nucleoside
  modified_base order(1^2,28^29): mod_base = OTHER; note = (1,3-dimethylimidazolidin-2-ylidene) Phosphoramidate linkage
  modified_base order(2..7,8..28): mod_base = OTHER; note = Phosphorothioate linkage
  modified_base 7^8: mod_base = OTHER; note = Methylphosphonate linkage
  misc_feature 1..29: note = RM110546
gaggantgggttcatttttcttgtctctt

SEQ ID NO: 755 - DNA, 26 bp, synthetic construct
  source 1..26: mol_type = other DNA
  misc_feature 22..23: note = DNA
  misc_feature order(1..21,24..26): note = RNA
  modified_base 21: mod_base = OTHER; note = 2-Prime-O-Methoxyethyl modified nucleoside
  modified_base 22: mod_base = OTHER; note = DNA nucleotide carrying a 6-amino-5-nitro-3-yl-2(1H)-pyridone nucleobase
  modified_base order(5,7,13,16,18..19,25): mod_base = OTHER; note = 2-Prime-Fluoro modified nucleoside
  modified_base order(1..4,6,8..12,14..15,17,20,24,26): mod_base = OTHER; note = 2-Prime-O-Methyl modified nucleoside
  modified_base order(1^2,25^26): mod_base = OTHER; note = (1,3-dimethylimidazolidin-2-ylidene) Phosphoramidate linkage
  modified_base order(2..23,24^25): mod_base = OTHER; note = Phosphorothioate linkage
  modified_base 23^24: mod_base = OTHER; note = Methylphosphonate linkage
  misc_feature 1..26: note = RM110547
attcggtcaaacctctgaggantggg

SEQ ID NO: 756 - DNA, 26 bp, synthetic construct
  source 1..26: mol_type = other DNA
  misc_feature 19..20: note = DNA
  misc_feature order(1..18,21..26): note = RNA
  modified_base 18: mod_base = OTHER; note = 2-Prime-O-Methoxyethyl modified nucleoside
  modified_base 19: mod_base = OTHER; note = DNA nucleotide carrying a 6-amino-5-nitro-3-yl-2(1H)-pyridone nucleobase
  modified_base order(2,4,10,13,15..16,22): mod_base = OTHER; note = 2-Prime-Fluoro modified nucleoside
  modified_base order(1,3,5..9,11..12,14,17,21,23..26): mod_base = OTHER; note = 2-Prime-O-Methyl modified nucleoside
  modified_base order(1^2,25^26): mod_base = OTHER; note = (1,3-dimethylimidazolidin-2-ylidene) Phosphoramidate linkage
  modified_base order(2..20,21..25): mod_base = OTHER; note = Phosphorothioate linkage
  modified_base 20^21: mod_base = OTHER; note = Methylphosphonate linkage
  misc_feature 1..26: note = RM110548
cggtcaaacctctgaggantgggttc

SEQ ID NO: 757 - DNA, 26 bp, synthetic construct
  source 1..26: mol_type = other DNA
  misc_feature 22..23: note = DNA
  misc_feature order(1..21,24..26): note = RNA
  modified_base 21: mod_base = OTHER; note = 2-Prime-O-Methoxyethyl modified nucleoside
  modified_base 22: mod_base = OTHER; note = DNA nucleotide carrying a 6-amino-5-nitro-3-yl-2(1H)-pyridone nucleobase
  modified_base order(13,16,18..19,25): mod_base = OTHER; note = 2-Prime-Fluoro modified nucleoside
  modified_base order(1..12,14..15,17,20,24,26): mod_base = OTHER; note = 2-Prime-O-Methyl modified nucleoside
  modified_base order(1^2,25^26): mod_base = OTHER; note = (1,3-dimethylimidazolidin-2-ylidene) Phosphoramidate linkage
  modified_base order(2..23,24^25): mod_base = OTHER; note = Phosphorothioate linkage
  modified_base 23^24: mod_base = OTHER; note = Methylphosphonate linkage
  misc_feature 1..26: note = RM110549
attcggtcaaacctctgaggantggg

SEQ ID NO: 758 - DNA, 26 bp, synthetic construct
  source 1..26: mol_type = other DNA
  misc_feature 19..20: note = DNA
  misc_feature order(1..18,21..26): note = RNA
  modified_base 18: mod_base = OTHER; note = 2-Prime-O-Methoxyethyl modified nucleoside
  modified_base 19: mod_base = OTHER; note = DNA nucleotide carrying a 6-amino-5-nitro-3-yl-2(1H)-pyridone nucleobase
  modified_base order(10,13,15..16,22): mod_base = OTHER; note = 2-Prime-Fluoro modified nucleoside
  modified_base order(1..9,11..12,14,17,21,23..26): mod_base = OTHER; note = 2-Prime-O-Methyl modified nucleoside
  modified_base order(1^2,25^26): mod_base = OTHER; note = (1,3-dimethylimidazolidin-2-ylidene) Phosphoramidate linkage
  modified_base order(2..20,21..25): mod_base = OTHER; note = Phosphorothioate linkage
  modified_base 20^21: mod_base = OTHER; note = Methylphosphonate linkage
  misc_feature 1..26: note = RM110550
cggtcaaacctctgaggantgggttc

SEQ ID NO: 759 - DNA, 26 bp, synthetic construct
  source 1..26: mol_type = other DNA
  misc_feature 16..17: note = DNA
  misc_feature order(1..15,18..26): note = RNA
  modified_base 15: mod_base = OTHER; note = 2-Prime-O-Methoxyethyl modified nucleoside
  modified_base 16: mod_base = OTHER; note = DNA nucleotide carrying a 6-amino-5-nitro-3-yl-2(1H)-pyridone nucleobase
  modified_base order(7,10,12..13,19): mod_base = OTHER; note = 2-Prime-Fluoro modified nucleoside
  modified_base order(1..6,8..9,11,14,18,20..26): mod_base = OTHER; note = 2-Prime-O-Methyl modified nucleoside
  modified_base order(1^2,25^26): mod_base = OTHER; note = (1,3-dimethylimidazolidin-2-ylidene) Phosphoramidate linkage
  modified_base order(2..17,18..25): mod_base = OTHER; note = Phosphorothioate linkage
  modified_base 17^18: mod_base = OTHER; note = Methylphosphonate linkage
  misc_feature 1..26: note = RM110551
tcaaacctctgaggantgggttcatt

SEQ ID NO: 760 - DNA, 26 bp, synthetic construct
  source 1..26: mol_type = other DNA
  misc_feature 13..14: note = DNA
  misc_feature order(1..12,15..26): note = RNA
  modified_base 12: mod_base = OTHER; note = 2-Prime-O-Methoxyethyl modified nucleoside
  modified_base 13: mod_base = OTHER; note = DNA nucleotide carrying a 6-amino-5-nitro-3-yl-2(1H)-pyridone nucleobase
  modified_base order(4,7,9..10,16): mod_base = OTHER; note = 2-Prime-Fluoro modified nucleoside
  modified_base order(1..3,5..6,8,11,15,17..26): mod_base = OTHER; note = 2-Prime-O-Methyl modified nucleoside
  modified_base order(1^2,25^26): mod_base = OTHER; note = (1,3-dimethylimidazolidin-2-ylidene) Phosphoramidate linkage
  modified_base order(2..14,15..25): mod_base = OTHER; note = Phosphorothioate linkage
  modified_base 14^15: mod_base = OTHER; note = Methylphosphonate linkage
  misc_feature 1..26: note = RM110552
aacctctgaggantgggttcattttt

SEQ ID NO: 761 - DNA, 26 bp, synthetic construct
  source 1..26: mol_type = other DNA
  misc_feature 10..11: note = DNA
  misc_feature order(1..9,12..26): note = RNA
  modified_base 9: mod_base = OTHER; note = 2-Prime-O-Methoxyethyl modified nucleoside
  modified_base 10: mod_base = OTHER; note = DNA nucleotide carrying a 6-amino-5-nitro-3-yl-2(1H)-pyridone nucleobase
  modified_base order(1,4,6..7,13): mod_base = OTHER; note = 2-Prime-Fluoro modified nucleoside
  modified_base order(2..3,5,8,12,14..26): mod_base = OTHER; note = 2-Prime-O-Methyl modified nucleoside
  modified_base order(1^2,25^26): mod_base = OTHER; note = (1,3-dimethylimidazolidin-2-ylidene) Phosphoramidate linkage
  modified_base order(2..11,12..25): mod_base = OTHER; note = Phosphorothioate linkage
  modified_base 11^12: mod_base = OTHER; note = Methylphosphonate linkage
  misc_feature 1..26: note = RM110553
ctctgaggantgggttcatttttctt

SEQ ID NO: 762 - DNA, 29 bp, synthetic construct
  source 1..29: mol_type = other DNA
  misc_feature 24..25: note = DNA
  misc_feature order(1..23,26..29): note = RNA
  modified_base 23: mod_base = OTHER; note = 2-Prime-O-Methoxyethyl modified nucleoside
  modified_base 24: mod_base = OTHER; note = DNA nucleotide carrying a 6-amino-5-nitro-3-yl-2(1H)-pyridone nucleobase
  modified_base order(15,18,20..21,27): mod_base = OTHER; note = 2-Prime-Fluoro modified nucleoside
  modified_base order(1..14,16..17,19,22,26,28..29): mod_base = OTHER; note = 2-Prime-O-Methyl modified nucleoside
  modified_base order(1^2,28^29): mod_base = OTHER; note = (1,3-dimethylimidazolidin-2-ylidene) Phosphoramidate linkage
  modified_base order(2..25,26..28): mod_base = OTHER; note = Phosphorothioate linkage
  modified_base 25^26: mod_base = OTHER; note = Methylphosphonate linkage
  misc_feature 1..29: note = RM110554
caattcggtcaaacctctgaggantgggt

SEQ ID NO: 763 - DNA, 29 bp, synthetic construct
  source 1..29: mol_type = other DNA
  misc_feature 21..22: note = DNA
  misc_feature order(1..20,23..29): note = RNA
  modified_base 20: mod_base = OTHER; note = 2-Prime-O-Methoxyethyl modified nucleoside
  modified_base 21: mod_base = OTHER; note = DNA nucleotide carrying a 6-amino-5-nitro-3-yl-2(1H)-pyridone nucleobase
  modified_base order(12,15,17..18,24): mod_base = OTHER; note = 2-Prime-Fluoro modified nucleoside
  modified_base order(1..11,13..14,16,19,23,25..29): mod_base = OTHER; note = 2-Prime-O-Methyl modified nucleoside
  modified_base order(1^2,28^29): mod_base = OTHER; note = (1,3-dimethylimidazolidin-2-ylidene) Phosphoramidate linkage
  modified_base order(2..22,23..28): mod_base = OTHER; note = Phosphorothioate linkage
  modified_base 22^23: mod_base = OTHER; note = Methylphosphonate linkage
  misc_feature 1..29: note = RM110555
ttcggtcaaacctctgaggantgggttca

SEQ ID NO: 764 - DNA, 29 bp, synthetic construct
  source 1..29: mol_type = other DNA
  misc_feature 18..19: note = DNA
  misc_feature order(1..17,20..29): note = RNA
  modified_base 17: mod_base = OTHER; note = 2-Prime-O-Methoxyethyl modified nucleoside
  modified_base 18: mod_base = OTHER; note = DNA nucleotide carrying a 6-amino-5-nitro-3-yl-2(1H)-pyridone nucleobase
  modified_base order(9,12,14..15,21): mod_base = OTHER; note = 2-Prime-Fluoro modified nucleoside
  modified_base order(1..8,10..11,13,16,20,22..29): mod_base = OTHER; note = 2-Prime-O-Methyl modified nucleoside
  modified_base order(1^2,28^29): mod_base = OTHER; note = (1,3-dimethylimidazolidin-2-ylidene) Phosphoramidate linkage
  modified_base order(2..19,20..28): mod_base = OTHER; note = Phosphorothioate linkage
  modified_base 19^20: mod_base = OTHER; note = Methylphosphonate linkage
  misc_feature 1..29: note = RM110556
ggtcaaacctctgaggantgggttcattt

SEQ ID NO: 765 - DNA, 29 bp, synthetic construct
  source 1..29: mol_type = other DNA
  misc_feature 15..16: note = DNA
  misc_feature order(1..14,17..29): note = RNA
  modified_base 14: mod_base = OTHER; note = 2-Prime-O-Methoxyethyl modified nucleoside
  modified_base 15: mod_base = OTHER; note = DNA nucleotide carrying a 6-amino-5-nitro-3-yl-2(1H)-pyridone nucleobase
  modified_base order(6,9,11..12,18): mod_base = OTHER; note = 2-Prime-Fluoro modified nucleoside
  modified_base order(1..5,7..8,10,13,17,19..29): mod_base = OTHER; note = 2-Prime-O-Methyl modified nucleoside
  modified_base order(1^2,28^29): mod_base = OTHER; note = (1,3-dimethylimidazolidin-2-ylidene) Phosphoramidate linkage
  modified_base order(2..16,17..28): mod_base = OTHER; note = Phosphorothioate linkage
  modified_base 16^17: mod_base = OTHER; note = Methylphosphonate linkage
  misc_feature 1..29: note = RM110557
caaacctctgaggantgggttcatttttc

SEQ ID NO: 766 - DNA, 29 bp, synthetic construct
  source 1..29: mol_type = other DNA
  misc_feature 12..13: note = DNA
  misc_feature order(1..11,14..29): note = RNA
  modified_base 11: mod_base = OTHER; note = 2-Prime-O-Methoxyethyl modified nucleoside
  modified_base 12: mod_base = OTHER; note = DNA nucleotide carrying a 6-amino-5-nitro-3-yl-2(1H)-pyridone nucleobase
  modified_base order(3,6,8..9,15): mod_base = OTHER; note = 2-Prime-Fluoro modified nucleoside
  modified_base order(1..2,4..5,7,10,14,16..29): mod_base = OTHER; note = 2-Prime-O-Methyl modified nucleoside
  modified_base order(1^2,28^29): mod_base = OTHER; note = (1,3-dimethylimidazolidin-2-ylidene) Phosphoramidate linkage
  modified_base order(2..13,14..28): mod_base = OTHER; note = Phosphorothioate linkage
  modified_base 13^14: mod_base = OTHER; note = Methylphosphonate linkage
  misc_feature 1..29: note = RM110558
acctctgaggantgggttcatttttcttg

SEQ ID NO: 767 - DNA, 26 bp, synthetic construct
  source 1..26: mol_type = other DNA
  misc_feature 22..23: note = DNA
  misc_feature order(1..21,24..26): note = RNA
  modified_base 21: mod_base = OTHER; note = 2-Prime-O-Methoxyethyl modified nucleoside
  modified_base 22: mod_base = OTHER; note = DNA nucleotide carrying a 6-amino-5-nitro-3-yl-2(1H)-pyridone nucleobase
  modified_base order(3..4,8..9,12..13,25): mod_base = OTHER; note = 2-Prime-Fluoro modified nucleoside
  modified_base order(1..2,5..7,10..11,14..20,24,26): mod_base = OTHER; note = 2-Prime-O-Methyl modified nucleoside
  modified_base order(1^2,25^26): mod_base = OTHER; note = (1,3-dimethylimidazolidin-2-ylidene) Phosphoramidate linkage
  modified_base order(2..23,24^25): mod_base = OTHER; note = Phosphorothioate linkage
  modified_base 23^24: mod_base = OTHER; note = Methylphosphonate linkage
  misc_feature 1..26: note = RM110559
attcggtcaaacctctgaggantggg

SEQ ID NO: 768 - DNA, 26 bp, synthetic construct
  source 1..26: mol_type = other DNA
  misc_feature 22..23: note = DNA
  misc_feature order(1..21,24..26): note = RNA
  modified_base 21: mod_base = OTHER; note = 2-Prime-O-Methoxyethyl modified nucleoside
  modified_base 22: mod_base = OTHER; note = DNA nucleotide carrying a 6-amino-5-nitro-3-yl-2(1H)-pyridone nucleobase
  modified_base order(8..9,12..13,25): mod_base = OTHER; note = 2-Prime-Fluoro modified nucleoside
  modified_base order(1..7,10..11,14..20,24,26): mod_base = OTHER; note = 2-Prime-O-Methyl modified nucleoside
  modified_base order(1^2,25^26): mod_base = OTHER; note = (1,3-dimethylimidazolidin-2-ylidene) Phosphoramidate linkage
  modified_base order(2..23,24^25): mod_base = OTHER; note = Phosphorothioate linkage
  modified_base 23^24: mod_base = OTHER; note = Methylphosphonate linkage
  misc_feature 1..26: note = RM110560
attcggtcaaacctctgaggantggg

SEQ ID NO: 769 - DNA, 26 bp, synthetic construct
  source 1..26: mol_type = other DNA
  misc_feature 19..20: note = DNA
  misc_feature order(1..18,21..26): note = RNA
  modified_base 18: mod_base = OTHER; note = 2-Prime-O-Methoxyethyl modified nucleoside
  modified_base 19: mod_base = OTHER; note = DNA nucleotide carrying a 6-amino-5-nitro-3-yl-2(1H)-pyridone nucleobase
  modified_base order(5..6,9..10,22): mod_base = OTHER; note = 2-Prime-Fluoro modified nucleoside
  modified_base order(1..4,7..8,11..17,21,23..26): mod_base = OTHER; note = 2-Prime-O-Methyl modified nucleoside
  modified_base order(1^2,25^26): mod_base = OTHER; note = (1,3-dimethylimidazolidin-2-ylidene) Phosphoramidate linkage
  modified_base order(2..20,21..25): mod_base = OTHER; note = Phosphorothioate linkage
  modified_base 20^21: mod_base = OTHER; note = Methylphosphonate linkage
  misc_feature 1..26: note = RM110561
cggtcaaacctctgaggantgggttc

SEQ ID NO: 770 - DNA, 26 bp, synthetic construct
  source 1..26: mol_type = other DNA
  misc_feature 16..17: note = DNA
  misc_feature order(1..15,18..26): note = RNA
  modified_base 15: mod_base = OTHER; note = 2-Prime-O-Methoxyethyl modified nucleoside
  modified_base 16: mod_base = OTHER; note = DNA nucleotide carrying a 6-amino-5-nitro-3-yl-2(1H)-pyridone nucleobase
  modified_base order(2..3,6..7,19): mod_base = OTHER; note = 2-Prime-Fluoro modified nucleoside
  modified_base order(1,4..5,8..14,18,20..26): mod_base = OTHER; note = 2-Prime-O-Methyl modified nucleoside
  modified_base order(1^2,25^26): mod_base = OTHER; note = (1,3-dimethylimidazolidin-2-ylidene) Phosphoramidate linkage
  modified_base order(2..17,18..25): mod_base = OTHER; note = Phosphorothioate linkage
  modified_base 17^18: mod_base = OTHER; note = Methylphosphonate linkage
  misc_feature 1..26: note = RM110562
tcaaacctctgaggantgggttcatt

SEQ ID NO: 771 - DNA, 29 bp, synthetic construct
  source 1..29: mol_type = other DNA
  misc_feature 24..25: note = DNA
  misc_feature order(1..23,26..29): note = RNA
  modified_base 23: mod_base = OTHER; note = 2-Prime-O-Methoxyethyl modified nucleoside
  modified_base 24: mod_base = OTHER; note = DNA nucleotide carrying a 6-amino-5-nitro-3-yl-2(1H)-pyridone nucleobase
  modified_base order(10..11,14..15,27): mod_base = OTHER; note = 2-Prime-Fluoro modified nucleoside
  modified_base order(1..9,12..13,16..22,26,28..29): mod_base = OTHER; note = 2-Prime-O-Methyl modified nucleoside
  modified_base order(1^2,28^29): mod_base = OTHER; note = (1,3-dimethylimidazolidin-2-ylidene) Phosphoramidate linkage
  modified_base order(2..25,26..28): mod_base = OTHER; note = Phosphorothioate linkage
  modified_base 25^26: mod_base = OTHER; note = Methylphosphonate linkage
  misc_feature 1..29: note = RM110563
caattcggtcaaacctctgaggantgggt

SEQ ID NO: 772 - DNA, 29 bp, synthetic construct
  source 1..29: mol_type = other DNA
  misc_feature 21..22: note = DNA
  misc_feature order(1..20,23..29): note = RNA
  modified_base 20: mod_base = OTHER; note = 2-Prime-O-Methoxyethyl modified nucleoside
  modified_base 21: mod_base = OTHER; note = DNA nucleotide carrying a 6-amino-5-nitro-3-yl-2(1H)-pyridone nucleobase
  modified_base order(7..8,11..12,24): mod_base = OTHER; note = 2-Prime-Fluoro modified nucleoside
  modified_base order(1..6,9..10,13..19,23,25..29): mod_base = OTHER; note = 2-Prime-O-Methyl modified nucleoside
  modified_base order(1^2,28^29): mod_base = OTHER; note = (1,3-dimethylimidazolidin-2-ylidene) Phosphoramidate linkage
  modified_base order(2..22,23..28): mod_base = OTHER; note = Phosphorothioate linkage
  modified_base 22^23: mod_base = OTHER; note = Methylphosphonate linkage
  misc_feature 1..29: note = RM110564
ttcggtcaaacctctgaggantgggttca

SEQ ID NO: 773 - DNA, 29 bp, synthetic construct
  source 1..29: mol_type = other DNA
  misc_feature 18..19: note = DNA
  misc_feature order(1..17,20..29): note = RNA
  modified_base 17: mod_base = OTHER; note = 2-Prime-O-Methoxyethyl modified nucleoside
  modified_base 18: mod_base = OTHER; note = DNA nucleotide carrying a 6-amino-5-nitro-3-yl-2(1H)-pyridone nucleobase
  modified_base order(4..5,8..9,21): mod_base = OTHER; note = 2-Prime-Fluoro modified nucleoside
  modified_base order(1..3,6..7,10..16,20,22..29): mod_base = OTHER; note = 2-Prime-O-Methyl modified nucleoside
  modified_base order(1^2,28^29): mod_base = OTHER; note = (1,3-dimethylimidazolidin-2-ylidene) Phosphoramidate linkage
  modified_base order(2..19,20..28): mod_base = OTHER; note = Phosphorothioate linkage
  modified_base 19^20: mod_base = OTHER; note = Methylphosphonate linkage
  misc_feature 1..29: note = RM110565
ggtcaaacctctgaggantgggttcattt

SEQ ID NO: 774 - DNA, 29 bp, synthetic construct
  source 1..29: mol_type = other DNA
  misc_feature 15..16: note = DNA
  misc_feature order(1..14,17..29): note = RNA
  modified_base 14: mod_base = OTHER; note = 2-Prime-O-Methoxyethyl modified nucleoside
  modified_base 15: mod_base = OTHER; note = DNA nucleotide carrying a 6-amino-5-nitro-3-yl-2(1H)-pyridone nucleobase
  modified_base order(1..2,5..6,18): mod_base = OTHER; note = 2-Prime-Fluoro modified nucleoside
  modified_base order(3..4,7..13,17,19..29): mod_base = OTHER; note = 2-Prime-O-Methyl modified nucleoside
  modified_base order(1^2,28^29): mod_base = OTHER; note = (1,3-dimethylimidazolidin-2-ylidene) Phosphoramidate linkage
  modified_base order(2..16,17..28): mod_base = OTHER; note = Phosphorothioate linkage
  modified_base 16^17: mod_base = OTHER; note = Methylphosphonate linkage
  misc_feature 1..29: note = RM110566
caaacctctgaggantgggttcatttttc

SEQ ID NO: 775 - DNA, 23 bp, synthetic construct
  source 1..23: mol_type = other DNA
  misc_feature 18..19: note = DNA
  misc_feature order(1..17,20..23): note = RNA
  modified_base 17: mod_base = OTHER; note = 2-Prime-O-Methoxyethyl modified nucleoside
  modified_base 18: mod_base = OTHER; note = DNA nucleotide carrying a 6-amino-5-nitro-3-yl-2(1H)-pyridone nucleobase
  modified_base order(9,21): mod_base = OTHER; note = 2-Prime-Fluoro modified nucleoside
  modified_base order(1..8,10..16,20,22..23): mod_base = OTHER; note = 2-Prime-O-Methyl modified nucleoside
  modified_base order(1^2,22^23): mod_base = OTHER; note = (1,3-dimethylimidazolidin-2-ylidene) Phosphoramidate linkage
  modified_base order(2..19,20..22): mod_base = OTHER; note = Phosphorothioate linkage
  modified_base 19^20: mod_base = OTHER; note = Methylphosphonate linkage
  misc_feature 1..23: note = RM110567
ggtcaaacctctgaggantgggt

SEQ ID NO: 776 - DNA, 23 bp, synthetic construct
  source 1..23: mol_type = other DNA
  misc_feature 15..16: note = DNA
  misc_feature order(1..14,17..23): note = RNA
  modified_base 14: mod_base = OTHER; note = 2-Prime-O-Methoxyethyl modified nucleoside
  modified_base 15: mod_base = OTHER; note = DNA nucleotide carrying a 6-amino-5-nitro-3-yl-2(1H)-pyridone nucleobase
  modified_base order(6,18): mod_base = OTHER; note = 2-Prime-Fluoro modified nucleoside
  modified_base order(1..5,7..13,17,19..23): mod_base = OTHER; note = 2-Prime-O-Methyl modified nucleoside
  modified_base order(1^2,22^23): mod_base = OTHER; note = (1,3-dimethylimidazolidin-2-ylidene) Phosphoramidate linkage
  modified_base order(2..16,17..22): mod_base = OTHER; note = Phosphorothioate linkage
  modified_base 16^17: mod_base = OTHER; note = Methylphosphonate linkage
  misc_feature 1..23: note = RM110568
caaacctctgaggantgggttca

SEQ ID NO: 777 - DNA, 23 bp, synthetic construct
  source 1..23: mol_type = other DNA
  misc_feature 12..13: note = DNA
  misc_feature order(1..11,14..23): note = RNA
  modified_base 11: mod_base = OTHER; note = 2-Prime-O-Methoxyethyl modified nucleoside
  modified_base 12: mod_base = OTHER; note = DNA nucleotide carrying a 6-amino-5-nitro-3-yl-2(1H)-pyridone nucleobase
  modified_base order(3,15): mod_base = OTHER; note = 2-Prime-Fluoro modified nucleoside
  modified_base order(1..2,4..10,14,16..23): mod_base = OTHER; note = 2-Prime-O-Methyl modified nucleoside
  modified_base order(1^2,22^23): mod_base = OTHER; note = (1,3-dimethylimidazolidin-2-ylidene) Phosphoramidate linkage
  modified_base order(2..13,14..22): mod_base = OTHER; note = Phosphorothioate linkage
  modified_base 13^14: mod_base = OTHER; note = Methylphosphonate linkage
  misc_feature 1..23: note = RM110569
acctctgaggantgggttcattt

SEQ ID NO: 778 - DNA, 26 bp, synthetic construct
  source 1..26: mol_type = other DNA
  misc_feature 22..23: note = DNA
  misc_feature order(1..21,24..26): note = RNA
  modified_base 21: mod_base = OTHER; note = 2-Prime-O-Methoxyethyl modified nucleoside
  modified_base 22: mod_base = OTHER; note = DNA nucleotide carrying a 6-amino-5-nitro-3-yl-2(1H)-pyridone nucleobase
  modified_base order(13,25): mod_base = OTHER; note = 2-Prime-Fluoro modified nucleoside
  modified_base order(1..12,14..20,24,26): mod_base = OTHER; note = 2-Prime-O-Methyl modified nucleoside
  modified_base order(1^2,25^26): mod_base = OTHER; note = (1,3-dimethylimidazolidin-2-ylidene) Phosphoramidate linkage
  modified_base order(2..23,24^25): mod_base = OTHER; note = Phosphorothioate linkage
  modified_base 23^24: mod_base = OTHER; note = Methylphosphonate linkage
  misc_feature 1..26: note = RM110570
attcggtcaaacctctgaggantggg

SEQ ID NO: 779 - DNA, 26 bp, synthetic construct
  source 1..26: mol_type = other DNA
  misc_feature 19..20: note = DNA
  misc_feature order(1..18,21..26): note = RNA
  modified_base 18: mod_base = OTHER; note = 2-Prime-O-Methoxyethyl modified nucleoside
  modified_base 19: mod_base = OTHER; note = DNA nucleotide carrying a 6-amino-5-nitro-3-yl-2(1H)-pyridone nucleobase
  modified_base order(10,22): mod_base = OTHER; note = 2-Prime-Fluoro modified nucleoside
  modified_base order(1..9,11..17,21,23..26): mod_base = OTHER; note = 2-Prime-O-Methyl modified nucleoside
  modified_base order(1^2,25^26): mod_base = OTHER; note = (1,3-dimethylimidazolidin-2-ylidene) Phosphoramidate linkage
  modified_base order(2..20,21..25): mod_base = OTHER; note = Phosphorothioate linkage
  modified_base 20^21: mod_base = OTHER; note = Methylphosphonate linkage
  misc_feature 1..26: note = RM110571
cggtcaaacctctgaggantgggttc

SEQ ID NO: 780 - DNA, 26 bp, synthetic construct
  source 1..26: mol_type = other DNA
  misc_feature 16..17: note = DNA
  misc_feature order(1..15,18..26): note = RNA
  modified_base 15: mod_base = OTHER; note = 2-Prime-O-Methoxyethyl modified nucleoside
  modified_base 16: mod_base = OTHER; note = DNA nucleotide carrying a 6-amino-5-nitro-3-yl-2(1H)-pyridone nucleobase
  modified_base order(7,19): mod_base = OTHER; note = 2-Prime-Fluoro modified nucleoside
  modified_base order(1..6,8..14,18,20..26): mod_base = OTHER; note = 2-Prime-O-Methyl modified nucleoside
  modified_base order(1^2,25^26): mod_base = OTHER; note = (1,3-dimethylimidazolidin-2-ylidene) Phosphoramidate linkage
  modified_base order(2..17,18..25): mod_base = OTHER; note = Phosphorothioate linkage
  modified_base 17^18: mod_base = OTHER; note = Methylphosphonate linkage
  misc_feature 1..26: note = RM110572
tcaaacctctgaggantgggttcatt

SEQ ID NO: 781 - DNA, 26 bp, synthetic construct
  source 1..26: mol_type = other DNA
  misc_feature 13..14: note = DNA
  misc_feature order(1..12,15..26): note = RNA
  modified_base 12: mod_base = OTHER; note = 2-Prime-O-Methoxyethyl modified nucleoside
  modified_base 13: mod_base = OTHER; note = DNA nucleotide carrying a 6-amino-5-nitro-3-yl-2(1H)-pyridone nucleobase
  modified_base order(4,16): mod_base = OTHER; note = 2-Prime-Fluoro modified nucleoside
  modified_base order(1..3,5..11,15,17..26): mod_base = OTHER; note = 2-Prime-O-Methyl modified nucleoside
  modified_base order(1^2,25^26): mod_base = OTHER; note = (1,3-dimethylimidazolidin-2-ylidene) Phosphoramidate linkage
  modified_base order(2..14,15..25): mod_base = OTHER; note = Phosphorothioate linkage
  modified_base 14^15: mod_base = OTHER; note = Methylphosphonate linkage
  misc_feature 1..26: note = RM110573
aacctctgaggantgggttcattttt

SEQ ID NO: 782 - DNA, 26 bp, synthetic construct
  source 1..26: mol_type = other DNA
  misc_feature 10..11: note = DNA
  misc_feature order(1..9,12..26): note = RNA
  modified_base 9: mod_base = OTHER; note = 2-Prime-O-Methoxyethyl modified nucleoside
  modified_base 10: mod_base = OTHER; note = DNA nucleotide carrying a 6-amino-5-nitro-3-yl-2(1H)-pyridone nucleobase
  modified_base order(1,13): mod_base = OTHER; note = 2-Prime-Fluoro modified nucleoside
  modified_base order(2..8,12,14..26): mod_base = OTHER; note = 2-Prime-O-Methyl modified nucleoside
  modified_base order(1^2,25^26): mod_base = OTHER; note = (1,3-dimethylimidazolidin-2-ylidene) Phosphoramidate linkage
  modified_base order(2..11,12..25): mod_base = OTHER; note = Phosphorothioate linkage
  modified_base 11^12: mod_base = OTHER; note = Methylphosphonate linkage
  misc_feature 1..26: note = RM110574
ctctgaggantgggttcatttttctt

SEQ ID NO: 783 - DNA, 29 bp, synthetic construct
  source 1..29: mol_type = other DNA
  misc_feature 24..25: note = DNA
  misc_feature order(1..23,26..29): note = RNA
  modified_base 23: mod_base = OTHER; note = 2-Prime-O-Methoxyethyl modified nucleoside
  modified_base 24: mod_base = OTHER; note = DNA nucleotide carrying a 6-amino-5-nitro-3-yl-2(1H)-pyridone nucleobase
  modified_base order(15,27): mod_base = OTHER; note = 2-Prime-Fluoro modified nucleoside
  modified_base order(1..14,16..22,26,28..29): mod_base = OTHER; note = 2-Prime-O-Methyl modified nucleoside
  modified_base order(1^2,28^29): mod_base = OTHER; note = (1,3-dimethylimidazolidin-2-ylidene) Phosphoramidate linkage
  modified_base order(2..25,26..28): mod_base = OTHER; note = Phosphorothioate linkage
  modified_base 25^26: mod_base = OTHER; note = Methylphosphonate linkage
  misc_feature 1..29: note = RM110575
caattcggtcaaacctctgaggantgggt

SEQ ID NO: 784 - DNA, 29 bp, synthetic construct
  source 1..29: mol_type = other DNA
  misc_feature 21..22: note = DNA
  misc_feature order(1..20,23..29): note = RNA
  modified_base 20: mod_base = OTHER; note = 2-Prime-O-Methoxyethyl modified nucleoside
  modified_base 21: mod_base = OTHER; note = DNA nucleotide carrying a 6-amino-5-nitro-3-yl-2(1H)-pyridone nucleobase
  modified_base order(12,24): mod_base = OTHER; note = 2-Prime-Fluoro modified nucleoside
  modified_base order(1..11,13..19,23,25..29): mod_base = OTHER; note = 2-Prime-O-Methyl modified nucleoside
  modified_base order(1^2,28^29): mod_base = OTHER; note = (1,3-dimethylimidazolidin-2-ylidene) Phosphoramidate linkage
  modified_base order(2..22,23..28): mod_base = OTHER; note = Phosphorothioate linkage
  modified_base 22^23: mod_base = OTHER; note = Methylphosphonate linkage
  misc_feature 1..29: note = RM110576
ttcggtcaaacctctgaggantgggttca

SEQ ID NO: 785 - DNA, 29 bp, synthetic construct
  source 1..29: mol_type = other DNA
  misc_feature 18..19: note = DNA
  misc_feature order(1..17,20..29): note = RNA
  modified_base 17: mod_base = OTHER; note = 2-Prime-O-Methoxyethyl modified nucleoside
  modified_base 18: mod_base = OTHER; note = DNA nucleotide carrying a 6-amino-5-nitro-3-yl-2(1H)-pyridone nucleobase
  modified_base order(9,21): mod_base = OTHER; note = 2-Prime-Fluoro modified nucleoside
  modified_base order(1..8,10..16,20,22..29): mod_base = OTHER; note = 2-Prime-O-Methyl modified nucleoside
  modified_base order(1^2,28^29): mod_base = OTHER; note = (1,3-dimethylimidazolidin-2-ylidene) Phosphoramidate linkage
  modified_base order(2..19,20..28): mod_base = OTHER; note = Phosphorothioate linkage
  modified_base 19^20: mod_base = OTHER; note = Methylphosphonate linkage
  misc_feature 1..29: note = RM110577
ggtcaaacctctgaggantgggttcattt

SEQ ID NO: 786 - DNA, 29 bp, synthetic construct
  source 1..29: mol_type = other DNA
  misc_feature 15..16: note = DNA
  misc_feature order(1..14,17..29): note = RNA
  modified_base 14: mod_base = OTHER; note = 2-Prime-O-Methoxyethyl modified nucleoside
  modified_base 15: mod_base = OTHER; note = DNA nucleotide carrying a 6-amino-5-nitro-3-yl-2(1H)-pyridone nucleobase
  modified_base order(6,18): mod_base = OTHER; note = 2-Prime-Fluoro modified nucleoside
  modified_base order(1..5,7..13,17,19..29): mod_base = OTHER; note = 2-Prime-O-Methyl modified nucleoside
  modified_base order(1^2,28^29): mod_base = OTHER; note = (1,3-dimethylimidazolidin-2-ylidene) Phosphoramidate linkage
  modified_base order(2..16,17..28): mod_base = OTHER; note = Phosphorothioate linkage
  modified_base 16^17: mod_base = OTHER; note = Methylphosphonate linkage
  misc_feature 1..29: note = RM110578
caaacctctgaggantgggttcatttttc

SEQ ID NO: 787 - DNA, 29 bp, synthetic construct
  source 1..29: mol_type = other DNA
  misc_feature 12..13: note = DNA
  misc_feature order(1..11,14..29): note = RNA
  modified_base 11: mod_base = OTHER; note = 2-Prime-O-Methoxyethyl modified nucleoside
  modified_base 12: mod_base = OTHER; note = DNA nucleotide carrying a 6-amino-5-nitro-3-yl-2(1H)-pyridone nucleobase
  modified_base order(3,15): mod_base = OTHER; note = 2-Prime-Fluoro modified nucleoside
  modified_base order(1..2,4..10,14,16..29): mod_base = OTHER; note = 2-Prime-O-Methyl modified nucleoside
  modified_base order(1^2,28^29): mod_base = OTHER; note = (1,3-dimethylimidazolidin-2-ylidene) Phosphoramidate linkage
  modified_base order(2..13,14..28): mod_base = OTHER; note = Phosphorothioate linkage
  modified_base 13^14: mod_base = OTHER; note = Methylphosphonate linkage
  misc_feature 1..29: note = RM110579
acctctgaggantgggttcatttttcttg

SEQ ID NO: 788 - DNA, 32 bp, synthetic construct; identical to SEQ ID NO: 133
  source 1..32: mol_type = other DNA
  misc_feature 10..11: note = DNA
  misc_feature order(1..9,12..32): note = RNA
  modified_base 9: mod_base = OTHER; note = 2-Prime-O-Methoxyethyl modified nucleoside
  modified_base 10: mod_base = OTHER; note = DNA nucleotide carrying a 6-amino-5-nitro-3-yl-2(1H)-pyridone nucleobase
  modified_base order(3,13..14,24,29..30): mod_base = OTHER; note = 2-Prime-Fluoro modified nucleoside
  modified_base order(1..2,4..8,12,15..23,25..28,31..32): mod_base = OTHER; note = 2-Prime-O-Methyl modified nucleoside
  modified_base order(1^2,31^32): mod_base = OTHER; note = (1,3-dimethylimidazolidin-2-ylidene) Phosphoramidate linkage
  modified_base order(2..11,12..31): mod_base = OTHER; note = Phosphorothioate linkage
  modified_base 11^12: mod_base = OTHER; note = Methylphosphonate linkage
  misc_feature 1..32: note = RM110580

SEQ ID NO: 789 - DNA, 32 bp, synthetic construct; identical to SEQ ID NO: 129
  source 1..32: mol_type = other DNA
  misc_feature 22..23: note = DNA
  misc_feature order(1..21,24..32): note = RNA
  modified_base 21: mod_base = OTHER; note = 2-Prime-O-Methoxyethyl modified nucleoside
  modified_base 22: mod_base = OTHER; note = DNA nucleotide carrying a 6-amino-5-nitro-3-yl-2(1H)-pyridone nucleobase
  modified_base order(4..5,10,20,25,31): mod_base = OTHER; note = 2-Prime-Fluoro modified nucleoside
  modified_base order(1..3,6..9,11..19,24,26..30,32): mod_base = OTHER; note = 2-Prime-O-Methyl modified nucleoside
  modified_base order(1^2,31^32): mod_base = OTHER; note = (1,3-dimethylimidazolidin-2-ylidene) Phosphoramidate linkage
  modified_base order(2..23,24..31): mod_base = OTHER; note = Phosphorothioate linkage
  modified_base 23^24: mod_base = OTHER; note = Methylphosphonate linkage
  misc_feature 1..32: note = RM110581

SEQ ID NO: 790 - DNA, 32 bp, synthetic construct; identical to SEQ ID NO: 19
  source 1..32: mol_type = other DNA
  misc_feature 19..20: note = DNA
  misc_feature order(1..18,21..32): note = RNA
  modified_base 18: mod_base = OTHER; note = 2-Prime-O-Methoxyethyl modified nucleoside
  modified_base 19: mod_base = OTHER; note = DNA nucleotide carrying a 6-amino-5-nitro-3-yl-2(1H)-pyridone nucleobase
  modified_base order(1..2,7,17,22,28): mod_base = OTHER; note = 2-Prime-Fluoro modified nucleoside
  modified_base order(3..6,8..16,21,23..27,29..32): mod_base = OTHER; note = 2-Prime-O-Methyl modified nucleoside
  modified_base order(1^2,31^32): mod_base = OTHER; note = (1,3-dimethylimidazolidin-2-ylidene) Phosphoramidate linkage
  modified_base order(2..20,21..31): mod_base = OTHER; note = Phosphorothioate linkage
  modified_base 20^21: mod_base = OTHER; note = Methylphosphonate linkage
  misc_feature 1..32: note = RM110582

SEQ ID NO: 791 - DNA, 23 bp, synthetic construct
  source 1..23: mol_type = other DNA
  misc_feature 9..10: note = DNA
  misc_feature order(1..8,11..23): note = RNA
  modified_base 8: mod_base = OTHER; note = 2-Prime-O-Methoxyethyl modified nucleoside
  modified_base 9: mod_base = OTHER; note = DNA nucleotide carrying a 6-amino-5-nitro-3-yl-2(1H)-pyridone nucleobase
  modified_base order(2,12..13,23): mod_base = OTHER; note = 2-Prime-Fluoro modified nucleoside
  modified_base order(1,3..7,11,14..22): mod_base = OTHER; note = 2-Prime-O-Methyl modified nucleoside
  modified_base order(1^2,22^23): mod_base = OTHER; note = (1,3-dimethylimidazolidin-2-ylidene) Phosphoramidate linkage
  modified_base order(2..10,11..22): mod_base = OTHER; note = Phosphorothioate linkage
  modified_base 10^11: mod_base = OTHER; note = Methylphosphonate linkage
  misc_feature 1..23: note = RM110583
tctgaggantgggttcatttttc

SEQ ID NO: 792 - DNA, 23 bp, synthetic construct
  source 1..23: mol_type = other DNA
  misc_feature 18..19: note = DNA
  misc_feature order(1..17,20..23): note = RNA
  modified_base 17: mod_base = OTHER; note = 2-Prime-O-Methoxyethyl modified nucleoside
  modified_base 18: mod_base = OTHER; note = DNA nucleotide carrying a 6-amino-5-nitro-3-yl-2(1H)-pyridone nucleobase
  modified_base order(11,21): mod_base = OTHER; note = 2-Prime-Fluoro modified nucleoside
  modified_base order(1..10,12..16,20,22..23): mod_base = OTHER; note = 2-Prime-O-Methyl modified nucleoside
  modified_base order(1^2,22^23): mod_base = OTHER; note = (1,3-dimethylimidazolidin-2-ylidene) Phosphoramidate linkage
  modified_base order(2..19,20..22): mod_base = OTHER; note = Phosphorothioate linkage
  modified_base 19^20: mod_base = OTHER; note = Methylphosphonate linkage
  misc_feature 1..23: note = RM110584
ggtcaaacctctgaggantgggt

SEQ ID NO: 793 - DNA, 23 bp, synthetic construct
  source 1..23: mol_type = other DNA
  misc_feature 15..16: note = DNA
  misc_feature order(1..14,17..23): note = RNA
  modified_base 14: mod_base = OTHER; note = 2-Prime-O-Methoxyethyl modified nucleoside
  modified_base 15: mod_base = OTHER; note = DNA nucleotide carrying a 6-amino-5-nitro-3-yl-2(1H)-pyridone nucleobase
  modified_base order(8,18): mod_base = OTHER; note = 2-Prime-Fluoro modified nucleoside
  modified_base order(1..7,9..13,17,19..23): mod_base = OTHER; note = 2-Prime-O-Methyl modified nucleoside
  modified_base order(1^2,22^23): mod_base = OTHER; note = (1,3-dimethylimidazolidin-2-ylidene) Phosphoramidate linkage
  modified_base order(2..16,17..22): mod_base = OTHER; note = Phosphorothioate linkage
  modified_base 16^17: mod_base = OTHER; note = Methylphosphonate linkage
  misc_feature 1..23: note = RM110585
caaacctctgaggantgggttca

SEQ ID NO: 794 - DNA, 23 bp, synthetic construct
  source 1..23: mol_type = other DNA
  misc_feature 12..13: note = DNA
  misc_feature order(1..11,14..23): note = RNA
  modified_base 11: mod_base = OTHER; note = 2-Prime-O-Methoxyethyl modified nucleoside
  modified_base 12: mod_base = OTHER; note = DNA nucleotide carrying a 6-amino-5-nitro-3-yl-2(1H)-pyridone nucleobase
  modified_base order(5,15): mod_base = OTHER; note = 2-Prime-Fluoro modified nucleoside
  modified_base order(1..4,6..10,14,16..23): mod_base = OTHER; note = 2-Prime-O-Methyl modified nucleoside
  modified_base order(1^2,22^23): mod_base = OTHER; note = (1,3-dimethylimidazolidin-2-ylidene) Phosphoramidate linkage
  modified_base order(2..13,14..22): mod_base = OTHER; note = Phosphorothioate linkage
  modified_base 13^14: mod_base = OTHER; note = Methylphosphonate linkage
  misc_feature 1..23: note = RM110586
acctctgaggantgggttcattt

SEQ ID NO: 795 - DNA, 23 bp, synthetic construct
  source 1..23: mol_type = other DNA
  misc_feature 9..10: note = DNA
  misc_feature order(1..8,11..23): note = RNA
  modified_base 8: mod_base = OTHER; note = 2-Prime-O-Methoxyethyl modified nucleoside
  modified_base 9: mod_base = OTHER; note = DNA nucleotide carrying a 6-amino-5-nitro-3-yl-2(1H)-pyridone nucleobase
  modified_base order(2,12): mod_base = OTHER; note = 2-Prime-Fluoro modified nucleoside
  modified_base order(1,3..7,11,13..23): mod_base = OTHER; note = 2-Prime-O-Methyl modified nucleoside
  modified_base order(1^2,22^23): mod_base = OTHER; note = (1,3-dimethylimidazolidin-2-ylidene) Phosphoramidate linkage
  modified_base order(2..10,11..22): mod_base = OTHER; note = Phosphorothioate linkage
  modified_base 10^11: mod_base = OTHER; note = Methylphosphonate linkage
  misc_feature 1..23: note = RM110587
tctgaggantgggttcatttttc

SEQ ID NO: 796 - DNA, 26 bp, synthetic construct
  source 1..26: mol_type = other DNA
  misc_feature 22..23: note = DNA
  misc_feature order(1..21,24..26): note = RNA
  modified_base 21: mod_base = OTHER; note = 2-Prime-O-Methoxyethyl modified nucleoside
  modified_base 22: mod_base = OTHER; note = DNA nucleotide carrying a 6-amino-5-nitro-3-yl-2(1H)-pyridone nucleobase
  modified_base order(15,25): mod_base = OTHER; note = 2-Prime-Fluoro modified nucleoside
  modified_base order(1..14,16..20,24,26): mod_base = OTHER; note = 2-Prime-O-Methyl modified nucleoside
  modified_base order(1^2,25^26): mod_base = OTHER; note = (1,3-dimethylimidazolidin-2-ylidene) Phosphoramidate linkage
  modified_base order(2..23,24^25): mod_base = OTHER; note = Phosphorothioate linkage
  modified_base 23^24: mod_base = OTHER; note = Methylphosphonate linkage
  misc_feature 1..26: note = RM110588
attcggtcaaacctctgaggantggg

SEQ ID NO: 797 - DNA, 26 bp, synthetic construct
  source 1..26: mol_type = other DNA
  misc_feature 19..20: note = DNA
  misc_feature order(1..18,21..26): note = RNA
  modified_base 18: mod_base = OTHER; note = 2-Prime-O-Methoxyethyl modified nucleoside
  modified_base 19: mod_base = OTHER; note = DNA nucleotide carrying a 6-amino-5-nitro-3-yl-2(1H)-pyridone nucleobase
  modified_base order(12,22): mod_base = OTHER; note = 2-Prime-Fluoro modified nucleoside
  modified_base order(1..11,13..17,21,23..26): mod_base = OTHER; note = 2-Prime-O-Methyl modified nucleoside
  modified_base order(1^2,25^26): mod_base = OTHER; note = (1,3-dimethylimidazolidin-2-ylidene) Phosphoramidate linkage
  modified_base order(2..20,21..25): mod_base = OTHER; note = Phosphorothioate linkage
  modified_base 20^21: mod_base = OTHER; note = Methylphosphonate linkage
  misc_feature 1..26: note = RM110589
cggtcaaacctctgaggantgggttc

SEQ ID NO: 798 - DNA, 26 bp, synthetic construct
  source 1..26: mol_type = other DNA
  misc_feature 16..17: note = DNA
  misc_feature order(1..15,18..26): note = RNA
  modified_base 15: mod_base = OTHER; note = 2-Prime-O-Methoxyethyl modified nucleoside
  modified_base 16: mod_base = OTHER; note = DNA nucleotide carrying a 6-amino-5-nitro-3-yl-2(1H)-pyridone nucleobase
  modified_base order(9,19): mod_base = OTHER; note = 2-Prime-Fluoro modified nucleoside
  modified_base order(1..8,10..14,18,20..26): mod_base = OTHER; note = 2-Prime-O-Methyl modified nucleoside
  modified_base order(1^2,25^26): mod_base = OTHER; note = (1,3-dimethylimidazolidin-2-ylidene) Phosphoramidate linkage
  modified_base order(2..17,18..25): mod_base = OTHER; note = Phosphorothioate linkage
  modified_base 17^18: mod_base = OTHER; note = Methylphosphonate linkage
  misc_feature 1..26: note = RM110590
tcaaacctctgaggantgggttcatt

SEQ ID NO: 799 - DNA, 26 bp, synthetic construct
  source 1..26: mol_type = other DNA
  misc_feature 13..14: note = DNA
  misc_feature order(1..12,15..26): note = RNA
  modified_base 12: mod_base = OTHER; note = 2-Prime-O-Methoxyethyl modified nucleoside
  modified_base 13: mod_base = OTHER; note = DNA nucleotide carrying a 6-amino-5-nitro-3-yl-2(1H)-pyridone nucleobase
  modified_base order(6,16): mod_base = OTHER; note = 2-Prime-Fluoro modified nucleoside
  modified_base order(1..5,7..11,15,17..26): mod_base = OTHER; note = 2-Prime-O-Methyl modified nucleoside
  modified_base order(1^2,25^26): mod_base = OTHER; note = (1,3-dimethylimidazolidin-2-ylidene) Phosphoramidate linkage
  modified_base order(2..14,15..25): mod_base = OTHER; note = Phosphorothioate linkage
  modified_base 14^15: mod_base = OTHER; note = Methylphosphonate linkage
  misc_feature 1..26: note = RM110591
aacctctgaggantgggttcattttt

SEQ ID NO: 800 - DNA, 26 bp, synthetic construct
  source 1..26: mol_type = other DNA
  misc_feature 10..11: note = DNA
  misc_feature order(1..9,12..26): note = RNA
  modified_base 9: mod_base = OTHER; note = 2-Prime-O-Methoxyethyl modified nucleoside
  modified_base 10: mod_base = OTHER; note = DNA nucleotide carrying a 6-amino-5-nitro-3-yl-2(1H)-pyridone nucleobase
  modified_base order(3,13): mod_base = OTHER; note = 2-Prime-Fluoro modified nucleoside
  modified_base order(1..2,4..8,12,14..26): mod_base = OTHER; note = 2-Prime-O-Methyl modified nucleoside
  modified_base order(1^2,25^26): mod_base = OTHER; note = (1,3-dimethylimidazolidin-2-ylidene) Phosphoramidate linkage
  modified_base order(2..11,12..25): mod_base = OTHER; note = Phosphorothioate linkage
  modified_base 11^12: mod_base = OTHER; note = Methylphosphonate linkage
  misc_feature 1..26: note = RM110592
ctctgaggantgggttcatttttctt

SEQ ID NO: 801 - DNA, 29 bp, synthetic construct
  source 1..29: mol_type = other DNA
  misc_feature 24..25: note = DNA
  misc_feature order(1..23,26..29): note = RNA
  modified_base 23: mod_base = OTHER; note = 2-Prime-O-Methoxyethyl modified nucleoside
  modified_base 24: mod_base = OTHER; note = DNA nucleotide carrying a 6-amino-5-nitro-3-yl-2(1H)-pyridone nucleobase
  modified_base order(17,27): mod_base = OTHER; note = 2-Prime-Fluoro modified nucleoside
  modified_base order(1..16,18..22,26,28..29): mod_base = OTHER; note = 2-Prime-O-Methyl modified nucleoside
  modified_base order(1^2,28^29): mod_base = OTHER; note = (1,3-dimethylimidazolidin-2-ylidene) Phosphoramidate linkage
  modified_base order(2..25,26..28): mod_base = OTHER; note = Phosphorothioate linkage
  modified_base 25^26: mod_base = OTHER; note = Methylphosphonate linkage
  misc_feature 1..29: note = RM110593
caattcggtcaaacctctgaggantgggt

SEQ ID NO: 802 - DNA, 29 bp, synthetic construct
  source 1..29: mol_type = other DNA
  misc_feature 21..22: note = DNA
  misc_feature order(1..20,23..29): note = RNA
  modified_base 20: mod_base = OTHER; note = 2-Prime-O-Methoxyethyl modified nucleoside
  modified_base 21: mod_base = OTHER; note = DNA nucleotide carrying a 6-amino-5-nitro-3-yl-2(1H)-pyridone nucleobase
  modified_base order(14,24): mod_base = OTHER; note = 2-Prime-Fluoro modified nucleoside
  modified_base order(1..13,15..19,23,25..29): mod_base = OTHER; note = 2-Prime-O-Methyl modified nucleoside
  modified_base order(1^2,28^29): mod_base = OTHER; note = (1,3-dimethylimidazolidin-2-ylidene) Phosphoramidate linkage
  modified_base order(2..22,23..28): mod_base = OTHER; note = Phosphorothioate linkage
  modified_base 22^23: mod_base = OTHER; note = Methylphosphonate linkage
  misc_feature 1..29: note = RM110594
ttcggtcaaacctctgaggantgggttca

SEQ ID NO: 803 - DNA, 29 bp, synthetic construct
  source 1..29: mol_type = other DNA
  misc_feature 18..19: note = DNA
  misc_feature order(1..17,20..29): note = RNA
  modified_base 17: mod_base = OTHER; note = 2-Prime-O-Methoxyethyl modified nucleoside
  modified_base 18: mod_base = OTHER; note = DNA nucleotide carrying a 6-amino-5-nitro-3-yl-2(1H)-pyridone nucleobase
  modified_base order(11,21): mod_base = OTHER; note = 2-Prime-Fluoro modified nucleoside
  modified_base order(1..10,12..16,20,22..29): mod_base = OTHER; note = 2-Prime-O-Methyl modified nucleoside
  modified_base order(1^2,28^29): mod_base = OTHER; note = (1,3-dimethylimidazolidin-2-ylidene) Phosphoramidate linkage
  modified_base order(2..19,20..28): mod_base = OTHER; note = Phosphorothioate linkage
  modified_base 19^20: mod_base = OTHER; note = Methylphosphonate linkage
  misc_feature 1..29: note = RM110595
ggtcaaacctctgaggantgggttcattt

SEQ ID NO: 804 - DNA, 29 bp, synthetic construct
  source 1..29: mol_type = other DNA
  misc_feature 15..16: note = DNA
  misc_feature order(1..14,17..29): note = RNA
  modified_base 14: mod_base = OTHER; note = 2-Prime-O-Methoxyethyl modified nucleoside
  modified_base 15: mod_base = OTHER; note = DNA nucleotide carrying a 6-amino-5-nitro-3-yl-2(1H)-pyridone nucleobase
  modified_base order(8,18): mod_base = OTHER; note = 2-Prime-Fluoro modified nucleoside
  modified_base order(1..7,9..13,17,19..29): mod_base = OTHER; note = 2-Prime-O-Methyl modified nucleoside
  modified_base order(1^2,28^29): mod_base = OTHER; note = (1,3-dimethylimidazolidin-2-ylidene) Phosphoramidate linkage
  modified_base order(2..16,17..28): mod_base = OTHER; note = Phosphorothioate linkage
  modified_base 16^17: mod_base = OTHER; note = Methylphosphonate linkage
  misc_feature 1..29: note = RM110596
caaacctctgaggantgggttcatttttc

SEQ ID NO: 805 - DNA, 29 bp, synthetic construct
  source 1..29: mol_type = other DNA
  misc_feature 12..13: note = DNA
  misc_feature order(1..11,14..29): note = RNA
  modified_base 11: mod_base = OTHER; note = 2-Prime-O-Methoxyethyl modified nucleoside
  modified_base 12: mod_base = OTHER; note = DNA nucleotide carrying a 6-amino-5-nitro-3-yl-2(1H)-pyridone nucleobase
  modified_base order(5,15): mod_base = OTHER; note = 2-Prime-Fluoro modified nucleoside
  modified_base order(1..4,6..10,14,16..29): mod_base = OTHER; note = 2-Prime-O-Methyl modified nucleoside
  modified_base order(1^2,28^29): mod_base = OTHER; note = (1,3-dimethylimidazolidin-2-ylidene) Phosphoramidate linkage
  modified_base order(2..13,14..28): mod_base = OTHER; note = Phosphorothioate linkage
  modified_base 13^14: mod_base = OTHER; note = Methylphosphonate linkage
  misc_feature 1..29: note = RM110597
acctctgaggantgggttcatttttcttg

SEQ ID NO: 806 - DNA, 29 bp, synthetic construct
  source 1..29: mol_type = other DNA
  misc_feature 9..10: note = DNA
  misc_feature order(1..8,11..29): note = RNA
  modified_base 8: mod_base = OTHER; note = 2-Prime-O-Methoxyethyl modified nucleoside
  modified_base 9: mod_base = OTHER; note = DNA nucleotide carrying a 6-amino-5-nitro-3-yl-2(1H)-pyridone nucleobase
  modified_base order(2,12): mod_base = OTHER; note = 2-Prime-Fluoro modified nucleoside
  modified_base order(1,3..7,11,13..29): mod_base = OTHER; note = 2-Prime-O-Methyl modified nucleoside
  modified_base order(1^2,28^29): mod_base = OTHER; note = (1,3-dimethylimidazolidin-2-ylidene) Phosphoramidate linkage
  modified_base order(2..10,11..28): mod_base = OTHER; note = Phosphorothioate linkage
  modified_base 10^11: mod_base = OTHER; note = Methylphosphonate linkage
  misc_feature 1..29: note = RM110598
tctgaggantgggttcatttttcttgtct

SEQ ID NO: 807 - DNA, 32 bp, synthetic construct; identical to SEQ ID NO: 19
  source 1..32: mol_type = other DNA
  misc_feature 19..20: note = DNA
  misc_feature order(1..18,21..32): note = RNA
  modified_base 18: mod_base = OTHER; note = 2-Prime-O-Methoxyethyl modified nucleoside
  modified_base 19: mod_base = OTHER; note = DNA nucleotide carrying a 6-amino-5-nitro-3-yl-2(1H)-pyridone nucleobase
  modified_base order(1,15..17,22..23,25,29..30): mod_base = OTHER; note = 2-Prime-Fluoro modified nucleoside
  modified_base order(2..14,21,24,26..28,31..32): mod_base = OTHER; note = 2-Prime-O-Methyl modified nucleoside
  modified_base order(1^2,31^32): mod_base = OTHER; note = (1,3-dimethylimidazolidin-2-ylidene) Phosphoramidate linkage
  modified_base order(2..20,21..31): mod_base = OTHER; note = Phosphorothioate linkage
  modified_base 20^21: mod_base = OTHER; note = Methylphosphonate linkage
  misc_feature 1..32: note = RM110599

SEQ ID NO: 808 - DNA, 32 bp, synthetic construct; identical to SEQ ID NO: 133
  source 1..32: mol_type = other DNA
  misc_feature 10..11: note = DNA
  misc_feature order(1..9,12..32): note = RNA
  modified_base 9: mod_base = OTHER; note = 2-Prime-O-Methoxyethyl modified nucleoside
  modified_base 10: mod_base = OTHER; note = DNA nucleotide carrying a 6-amino-5-nitro-3-yl-2(1H)-pyridone nucleobase
  modified_base order(1..2,6,8,13..16,30): mod_base = OTHER; note = 2-Prime-Fluoro modified nucleoside
  modified_base order(3..5,7,12,17..29,31..32): mod_base = OTHER; note = 2-Prime-O-Methyl modified nucleoside
  modified_base order(1^2,31^32): mod_base = OTHER; note = (1,3-dimethylimidazolidin-2-ylidene) Phosphoramidate linkage
  modified_base order(2..11,12..31): mod_base = OTHER; note = Phosphorothioate linkage
  modified_base 11^12: mod_base = OTHER; note = Methylphosphonate linkage
  misc_feature 1..32: note = RM110600

SEQ ID NO: 809 - DNA, 23 bp, synthetic construct
  source 1..23: mol_type = other DNA
  misc_feature 12..13: note = DNA
  misc_feature order(1..11,14..23): note = RNA
  modified_base 11: mod_base = OTHER; note = 2-Prime-O-Methoxyethyl modified nucleoside
  modified_base 12: mod_base = OTHER; note = DNA nucleotide carrying a 6-amino-5-nitro-3-yl-2(1H)-pyridone nucleobase
  modified_base order(10,15..16,18,22..23): mod_base = OTHER; note = 2-Prime-Fluoro modified nucleoside
  modified_base order(1..9,14,17,19..21): mod_base = OTHER; note = 2-Prime-O-Methyl modified nucleoside
  modified_base order(1^2,22^23): mod_base = OTHER; note = (1,3-dimethylimidazolidin-2-ylidene) Phosphoramidate linkage
  modified_base order(2..13,14..22): mod_base = OTHER; note = Phosphorothioate linkage
  modified_base 13^14: mod_base = OTHER; note = Methylphosphonate linkage
  misc_feature 1..23: note = RM110601
acctctgaggantgggttcattt

SEQ ID NO: 810 - DNA, 23 bp, synthetic construct
  source 1..23: mol_type = other DNA
  misc_feature 9..10: note = DNA
  misc_feature order(1..8,11..23): note = RNA
  modified_base 8: mod_base = OTHER; note = 2-Prime-O-Methoxyethyl modified nucleoside
  modified_base 9: mod_base = OTHER; note = DNA nucleotide carrying a 6-amino-5-nitro-3-yl-2(1H)-pyridone nucleobase
  modified_base order(7,12..13,15,19..20): mod_base = OTHER; note = 2-Prime-Fluoro modified nucleoside
  modified_base order(1..6,11,14,16..18,21..23): mod_base = OTHER; note = 2-Prime-O-Methyl modified nucleoside
  modified_base order(1^2,22^23): mod_base = OTHER; note = (1,3-dimethylimidazolidin-2-ylidene) Phosphoramidate linkage
  modified_base order(2..10,11..22): mod_base = OTHER; note = Phosphorothioate linkage
  modified_base 10^11: mod_base = OTHER; note = Methylphosphonate linkage
  misc_feature 1..23: note = RM110602
tctgaggantgggttcatttttc

SEQ ID NO: 811 - DNA, 23 bp, synthetic construct
  source 1..23: mol_type = other DNA
  misc_feature 6..7: note = DNA
  misc_feature order(1..5,8..23): note = RNA
  modified_base 5: mod_base = OTHER; note = 2-Prime-O-Methoxyethyl modified nucleoside
  modified_base 6: mod_base = OTHER; note = DNA nucleotide carrying a 6-amino-5-nitro-3-yl-2(1H)-pyridone nucleobase
  modified_base order(4,9..10,12,16..17): mod_base = OTHER; note = 2-Prime-Fluoro modified nucleoside
  modified_base order(1..3,8,11,13..15,18..23): mod_base = OTHER; note = 2-Prime-O-Methyl modified nucleoside
  modified_base order(1^2,22^23): mod_base = OTHER; note = (1,3-dimethylimidazolidin-2-ylidene) Phosphoramidate linkage
  modified_base order(2..7,8..22): mod_base = OTHER; note = Phosphorothioate linkage
  modified_base 7^8: mod_base = OTHER; note = Methylphosphonate linkage
  misc_feature 1..23: note = RM110603
gaggantgggttcatttttcttg

SEQ ID NO: 812 - DNA, 32 bp, synthetic construct; identical to SEQ ID NO: 19
  source 1..32: mol_type = other DNA
  misc_feature 19..20: note = DNA
  misc_feature order(1..18,21..32): note = RNA
  modified_base 18: mod_base = OTHER; note = 2-Prime-O-Methoxyethyl modified nucleoside
  modified_base 19: mod_base = OTHER; note = DNA nucleotide carrying a 6-amino-5-nitro-3-yl-2(1H)-pyridone nucleobase
  modified_base order(17,22..23,25,29..30): mod_base = OTHER; note = 2-Prime-Fluoro modified nucleoside
  modified_base order(1..16,21,24,26..28,31..32): mod_base = OTHER; note = 2-Prime-O-Methyl modified nucleoside
  modified_base order(1^2,31^32): mod_base = OTHER; note = (1,3-dimethylimidazolidin-2-ylidene) Phosphoramidate linkage
  modified_base order(2..20,21..31): mod_base = OTHER; note = Phosphorothioate linkage
  modified_base 20^21: mod_base = OTHER; note = Methylphosphonate linkage
  misc_feature 1..32: note = RM110604

SEQ ID NO: 813 - DNA, 32 bp, synthetic construct; identical to SEQ ID NO: 131
  source 1..32: mol_type = other DNA
  misc_feature 16..17: note = DNA
  misc_feature order(1..15,18..32): note = RNA
  modified_base 15: mod_base = OTHER; note = 2-Prime-O-Methoxyethyl modified nucleoside
  modified_base 16: mod_base = OTHER; note = DNA nucleotide carrying a 6-amino-5-nitro-3-yl-2(1H)-pyridone nucleobase
  modified_base order(14,19..20,22,26..27): mod_base = OTHER; note = 2-Prime-Fluoro modified nucleoside
  modified_base order(1..13,18,21,23..25,28..32): mod_base = OTHER; note = 2-Prime-O-Methyl modified nucleoside
  modified_base order(1^2,31^32): mod_base = OTHER; note = (1,3-dimethylimidazolidin-2-ylidene) Phosphoramidate linkage
  modified_base order(2..17,18..31): mod_base = OTHER; note = Phosphorothioate linkage
  modified_base 17^18: mod_base = OTHER; note = Methylphosphonate linkage
  misc_feature 1..32: note = RM110605

SEQ ID NO: 814 - DNA, 32 bp, synthetic construct; identical to SEQ ID NO: 132
  source 1..32: mol_type = other DNA
  misc_feature 13..14: note = DNA
  misc_feature order(1..12,15..32): note = RNA
  modified_base 12: mod_base = OTHER; note = 2-Prime-O-Methoxyethyl modified nucleoside
  modified_base 13: mod_base = OTHER; note = DNA nucleotide carrying a 6-amino-5-nitro-3-yl-2(1H)-pyridone nucleobase
  modified_base order(11,16..17,19,23..24): mod_base = OTHER; note = 2-Prime-Fluoro modified nucleoside
  modified_base order(1..10,15,18,20..22,25..32): mod_base = OTHER; note = 2-Prime-O-Methyl modified nucleoside
  modified_base order(1^2,31^32): mod_base = OTHER; note = (1,3-dimethylimidazolidin-2-ylidene) Phosphoramidate linkage
  modified_base order(2..14,15..31): mod_base = OTHER; note = Phosphorothioate linkage
  modified_base 14^15: mod_base = OTHER; note = Methylphosphonate linkage
  misc_feature 1..32: note = RM110606

SEQ ID NO: 815 - DNA, 32 bp, synthetic construct; identical to SEQ ID NO: 133
  source 1..32: mol_type = other DNA
  misc_feature 10..11: note = DNA
  misc_feature order(1..9,12..32): note = RNA
  modified_base 9: mod_base = OTHER; note = 2-Prime-O-Methoxyethyl modified nucleoside
  modified_base 10: mod_base = OTHER; note = DNA nucleotide carrying a 6-amino-5-nitro-3-yl-2(1H)-pyridone nucleobase
  modified_base order(8,13..14,16,20..21): mod_base = OTHER; note = 2-Prime-Fluoro modified nucleoside
  modified_base order(1..7,12,15,17..19,22..32): mod_base = OTHER; note = 2-Prime-O-Methyl modified nucleoside
  modified_base order(1^2,31^32): mod_base = OTHER; note = (1,3-dimethylimidazolidin-2-ylidene) Phosphoramidate linkage
  modified_base order(2..11,12..31): mod_base = OTHER; note = Phosphorothioate linkage
  modified_base 11^12: mod_base = OTHER; note = Methylphosphonate linkage
  misc_feature 1..32: note = RM110607

SEQ ID NO: 816 - DNA, 32 bp, synthetic construct; identical to SEQ ID NO: 134
  source 1..32: mol_type = other DNA
  misc_feature 7..8: note = DNA
  misc_feature order(1..6,9..32): note = RNA
  modified_base 6: mod_base = OTHER; note = 2-Prime-O-Methoxyethyl modified nucleoside
  modified_base 7: mod_base = OTHER; note = DNA nucleotide carrying a 6-amino-5-nitro-3-yl-2(1H)-pyridone nucleobase
  modified_base order(5,10..11,13,17..18): mod_base = OTHER; note = 2-Prime-Fluoro modified nucleoside
  modified_base order(1..4,9,12,14..16,19..32): mod_base = OTHER; note = 2-Prime-O-Methyl modified nucleoside
  modified_base order(1^2,31^32): mod_base = OTHER; note = (1,3-dimethylimidazolidin-2-ylidene) Phosphoramidate linkage
  modified_base order(2..8,9..31): mod_base = OTHER; note = Phosphorothioate linkage
  modified_base 8^9: mod_base = OTHER; note = Methylphosphonate linkage
  misc_feature 1..32: note = RM110608

SEQ ID NO: 817 - DNA, 23 bp, synthetic construct
  source 1..23: mol_type = other DNA
  misc_feature 18..19: note = DNA
  misc_feature order(1..17,20..23): note = RNA
  modified_base 17: mod_base = OTHER; note = 2-Prime-O-Methoxyethyl modified nucleoside
  modified_base 18: mod_base = OTHER; note = DNA nucleotide carrying a 6-amino-5-nitro-3-yl-2(1H)-pyridone nucleobase
  modified_base order(9..10,14,16,21..22): mod_base = OTHER; note = 2-Prime-Fluoro modified nucleoside
  modified_base order(1..8,11..13,15,20,23): mod_base = OTHER; note = 2-Prime-O-Methyl modified nucleoside
  modified_base order(1^2,22^23): mod_base = OTHER; note = (1,3-dimethylimidazolidin-2-ylidene) Phosphoramidate linkage
  modified_base order(2..19,20..22): mod_base = OTHER; note = Phosphorothioate linkage
  modified_base 19^20: mod_base = OTHER; note = Methylphosphonate linkage
  misc_feature 1..23: note = RM110609
ggtcaaacctctgaggantgggt

SEQ ID NO: 818 - DNA, 23 bp, synthetic construct
  source 1..23: mol_type = other DNA
  misc_feature 15..16: note = DNA
  misc_feature order(1..14,17..23): note = RNA
  modified_base 14: mod_base = OTHER; note = 2-Prime-O-Methoxyethyl modified nucleoside
  modified_base 15: mod_base = OTHER; note = DNA nucleotide carrying a 6-amino-5-nitro-3-yl-2(1H)-pyridone nucleobase
  modified_base order(6..7,11,13,18..19): mod_base = OTHER; note = 2-Prime-Fluoro modified nucleoside
  modified_base order(1..5,8..10,12,17,20..23): mod_base = OTHER; note = 2-Prime-O-Methyl modified nucleoside
  modified_base order(1^2,22^23): mod_base = OTHER; note = (1,3-dimethylimidazolidin-2-ylidene) Phosphoramidate linkage
  modified_base order(2..16,17..22): mod_base = OTHER; note = Phosphorothioate linkage
  modified_base 16^17: mod_base = OTHER; note = Methylphosphonate linkage
  misc_feature 1..23: note = RM110610
caaacctctgaggantgggttca

SEQ ID NO: 819 - DNA, 23 bp, synthetic construct
  source 1..23: mol_type = other DNA
  misc_feature 12..13: note = DNA
  misc_feature order(1..11,14..23): note = RNA
  modified_base 11: mod_base = OTHER; note = 2-Prime-O-Methoxyethyl modified nucleoside
  modified_base 12: mod_base = OTHER; note = DNA nucleotide carrying a 6-amino-5-nitro-3-yl-2(1H)-pyridone nucleobase
  modified_base order(3..4,8,10,15..16): mod_base = OTHER; note = 2-Prime-Fluoro modified nucleoside
  modified_base order(1..2,5..7,9,14,17..23): mod_base = OTHER; note = 2-Prime-O-Methyl modified nucleoside
  modified_base order(1^2,22^23): mod_base = OTHER; note = (1,3-dimethylimidazolidin-2-ylidene) Phosphoramidate linkage
  modified_base order(2..13,14..22): mod_base = OTHER; note = Phosphorothioate linkage
  modified_base 13^14: mod_base = OTHER; note = Methylphosphonate linkage
  misc_feature 1..23: note = RM110611
acctctgaggantgggttcattt

SEQ ID NO: 820 - DNA, 32 bp, synthetic construct; identical to SEQ ID NO: 127
  source 1..32: mol_type = other DNA
  misc_feature 28..29: note = DNA
  misc_feature order(1..27,30..32): note = RNA
  modified_base 27: mod_base = OTHER; note = 2-Prime-O-Methoxyethyl modified nucleoside
  modified_base 28: mod_base = OTHER; note = DNA nucleotide carrying a 6-amino-5-nitro-3-yl-2(1H)-pyridone nucleobase
  modified_base order(19..20,24,26,31..32): mod_base = OTHER; note = 2-Prime-Fluoro modified nucleoside
  modified_base order(1..18,21..23,25,30): mod_base = OTHER; note = 2-Prime-O-Methyl modified nucleoside
  modified_base order(1^2,31^32): mod_base = OTHER; note = (1,3-dimethylimidazolidin-2-ylidene) Phosphoramidate linkage
  modified_base order(2..29,30^31): mod_base = OTHER; note = Phosphorothioate linkage
  modified_base 29^30: mod_base = OTHER; note = Methylphosphonate linkage
  misc_feature 1..32: note = RM110612

SEQ ID NO: 821 - DNA, 32 bp, synthetic construct; identical to SEQ ID NO: 128
  source 1..32: mol_type = other DNA
  misc_feature 25..26: note = DNA
  misc_feature order(1..24,27..32): note = RNA
  modified_base 24: mod_base = OTHER; note = 2-Prime-O-Methoxyethyl modified nucleoside
  modified_base 25: mod_base = OTHER; note = DNA nucleotide carrying a 6-amino-5-nitro-3-yl-2(1H)-pyridone nucleobase
  modified_base order(16..17,21,23,28..29): mod_base = OTHER; note = 2-Prime-Fluoro modified nucleoside
  modified_base order(1..15,18..20,22,27,30..32): mod_base = OTHER; note = 2-Prime-O-Methyl modified nucleoside
  modified_base order(1^2,31^32): mod_base = OTHER; note = (1,3-dimethylimidazolidin-2-ylidene) Phosphoramidate linkage
  modified_base order(2..26,27..31): mod_base = OTHER; note = Phosphorothioate linkage
  modified_base 26^27: mod_base = OTHER; note = Methylphosphonate linkage
  misc_feature 1..32: note = RM110613

SEQ ID NO: 822 - DNA, 32 bp, synthetic construct; identical to SEQ ID NO: 129
  source 1..32: mol_type = other DNA
  misc_feature 22..23: note = DNA
  misc_feature order(1..21,24..32): note = RNA
  modified_base 21: mod_base = OTHER; note = 2-Prime-O-Methoxyethyl modified nucleoside
  modified_base 22: mod_base = OTHER; note = DNA nucleotide carrying a 6-amino-5-nitro-3-yl-2(1H)-pyridone nucleobase
  modified_base order(13..14,18,20,25..26): mod_base = OTHER; note = 2-Prime-Fluoro modified nucleoside
  modified_base order(1..12,15..17,19,24,27..32): mod_base = OTHER; note = 2-Prime-O-Methyl modified nucleoside
  modified_base order(1^2,31^32): mod_base = OTHER; note = (1,3-dimethylimidazolidin-2-ylidene) Phosphoramidate linkage
  modified_base order(2..23,24..31): mod_base = OTHER; note = Phosphorothioate linkage
  modified_base 23^24: mod_base = OTHER; note = Methylphosphonate linkage
  misc_feature 1..32: note = RM110614

SEQ ID NO: 823 - DNA, 32 bp, synthetic construct; identical to SEQ ID NO: 19
  source 1..32: mol_type = other DNA
  misc_feature 19..20: note = DNA
  misc_feature order(1..18,21..32): note = RNA
  modified_base 18: mod_base = OTHER; note = 2-Prime-O-Methoxyethyl modified nucleoside
  modified_base 19: mod_base = OTHER; note = DNA nucleotide carrying a 6-amino-5-nitro-3-yl-2(1H)-pyridone nucleobase
  modified_base order(10..11,15,17,22..23): mod_base = OTHER; note = 2-Prime-Fluoro modified nucleoside
  modified_base order(1..9,12..14,16,21,24..32): mod_base = OTHER; note = 2-Prime-O-Methyl modified nucleoside
  modified_base order(1^2,31^32): mod_base = OTHER; note = (1,3-dimethylimidazolidin-2-ylidene) Phosphoramidate linkage
  modified_base order(2..20,21..31): mod_base = OTHER; note = Phosphorothioate linkage
  modified_base 20^21: mod_base = OTHER; note = Methylphosphonate linkage
  misc_feature 1..32: note = RM110615

SEQ ID NO: 824 - DNA, 32 bp, synthetic construct; identical to SEQ ID NO: 131
  source 1..32: mol_type = other DNA
  misc_feature 16..17: note = DNA
  misc_feature order(1..15,18..32): note = RNA
  modified_base 15: mod_base = OTHER; note = 2-Prime-O-Methoxyethyl modified nucleoside
  modified_base 16: mod_base = OTHER; note = DNA nucleotide carrying a 6-amino-5-nitro-3-yl-2(1H)-pyridone nucleobase
  modified_base order(7..8,12,14,19..20): mod_base = OTHER; note = 2-Prime-Fluoro modified nucleoside
  modified_base order(1..6,9..11,13,18,21..32): mod_base = OTHER; note = 2-Prime-O-Methyl modified nucleoside
  modified_base order(1^2,31^32): mod_base = OTHER; note = (1,3-dimethylimidazolidin-2-ylidene) Phosphoramidate linkage
  modified_base order(2..17,18..31): mod_base = OTHER; note = Phosphorothioate linkage
  modified_base 17^18: mod_base = OTHER; note = Methylphosphonate linkage
  misc_feature 1..32: note = RM110616

SEQ ID NO: 825 - DNA, 32 bp, synthetic construct; identical to SEQ ID NO: 132
  source 1..32: mol_type = other DNA
  misc_feature 13..14: note = DNA
  misc_feature order(1..12,15..32): note = RNA
  modified_base 12: mod_base = OTHER; note = 2-Prime-O-Methoxyethyl modified nucleoside
  modified_base 13: mod_base = OTHER; note = DNA nucleotide carrying a 6-amino-5-nitro-3-yl-2(1H)-pyridone nucleobase
  modified_base order(4..5,9,11,16..17): mod_base = OTHER; note = 2-Prime-Fluoro modified nucleoside
  modified_base order(1..3,6..8,10,15,18..32): mod_base = OTHER; note = 2-Prime-O-Methyl modified nucleoside
  modified_base order(1^2,31^32): mod_base = OTHER; note = (1,3-dimethylimidazolidin-2-ylidene) Phosphoramidate linkage
  modified_base order(2..14,15..31): mod_base = OTHER; note = Phosphorothioate linkage
  modified_base 14^15: mod_base = OTHER; note = Methylphosphonate linkage
  misc_feature 1..32: note = RM110617

SEQ ID NO: 826 - DNA, 32 bp, synthetic construct; identical to SEQ ID NO: 133
  source 1..32: mol_type = other DNA
  misc_feature 10..11: note = DNA
  misc_feature order(1..9,12..32): note = RNA
  modified_base 9: mod_base = OTHER; note = 2-Prime-O-Methoxyethyl modified nucleoside
  modified_base 10: mod_base = OTHER; note = DNA nucleotide carrying a 6-amino-5-nitro-3-yl-2(1H)-pyridone nucleobase
  modified_base order(1..2,6,8,13..14): mod_base = OTHER; note = 2-Prime-Fluoro modified nucleoside
  modified_base order(3..5,7,12,15..32): mod_base = OTHER; note = 2-Prime-O-Methyl modified nucleoside
  modified_base order(1^2,31^32): mod_base = OTHER; note = (1,3-dimethylimidazolidin-2-ylidene) Phosphoramidate linkage
  modified_base order(2..11,12..31): mod_base = OTHER; note = Phosphorothioate linkage
  modified_base 11^12: mod_base = OTHER; note = Methylphosphonate linkage
  misc_feature 1..32: note = RM110618

SEQ ID NO: 827 - DNA, 32 bp, synthetic construct; identical to SEQ ID NO: 127
  source 1..32: mol_type = other DNA
  misc_feature 28..29: note = DNA
  misc_feature order(1..27,30..32): note = RNA
  modified_base 27: mod_base = OTHER; note = 2-Prime-O-Methoxyethyl modified nucleoside
  modified_base 28: mod_base = OTHER; note = DNA nucleotide carrying a 6-amino-5-nitro-3-yl-2(1H)-pyridone nucleobase
  modified_base order(26,31..32): mod_base = OTHER; note = 2-Prime-Fluoro modified nucleoside
  modified_base order(1..25,30): mod_base = OTHER; note = 2-Prime-O-Methyl modified nucleoside
  modified_base order(1^2,31^32): mod_base = OTHER; note = (1,3-dimethylimidazolidin-2-ylidene) Phosphoramidate linkage
  modified_base order(2..29,30^31): mod_base = OTHER; note = Phosphorothioate linkage
  modified_base 29^30: mod_base = OTHER; note = Methylphosphonate linkage
  misc_feature 1..32: note = RM110619

SEQ ID NO: 828 - DNA, 32 bp, synthetic construct; identical to SEQ ID NO: 128
  source 1..32: mol_type = other DNA
  misc_feature 25..26: note = DNA
  misc_feature order(1..24,27..32): note = RNA
  modified_base 24: mod_base = OTHER; note = 2-Prime-O-Methoxyethyl modified nucleoside
  modified_base 25: mod_base = OTHER; note = DNA nucleotide carrying a 6-amino-5-nitro-3-yl-2(1H)-pyridone nucleobase
  modified_base order(23,28..29): mod_base = OTHER; note = 2-Prime-Fluoro modified nucleoside
  modified_base order(1..22,27,30..32): mod_base = OTHER; note = 2-Prime-O-Methyl modified nucleoside
  modified_base order(1^2,31^32): mod_base = OTHER; note = (1,3-dimethylimidazolidin-2-ylidene) Phosphoramidate linkage
  modified_base order(2..26,27..31): mod_base = OTHER; note = Phosphorothioate linkage
  modified_base 26^27: mod_base = OTHER; note = Methylphosphonate linkage
  misc_feature 1..32: note = RM110620

SEQ ID NO: 829 - DNA, 32 bp, synthetic construct; identical to SEQ ID NO: 129
  source 1..32: mol_type = other DNA
  misc_feature 22..23: note = DNA
  misc_feature order(1..21,24..32): note = RNA
  modified_base 21: mod_base = OTHER; note = 2-Prime-O-Methoxyethyl modified nucleoside
  modified_base 22: mod_base = OTHER; note = DNA nucleotide carrying a 6-amino-5-nitro-3-yl-2(1H)-pyridone nucleobase
  modified_base order(20,25..26): mod_base = OTHER; note = 2-Prime-Fluoro modified nucleoside
  modified_base order(1..19,24,27..32): mod_base = OTHER; note = 2-Prime-O-Methyl modified nucleoside
  modified_base order(1^2,31^32): mod_base = OTHER; note = (1,3-dimethylimidazolidin-2-ylidene) Phosphoramidate linkage
  modified_base order(2..23,24..31): mod_base = OTHER; note = Phosphorothioate linkage
  modified_base 23^24: mod_base = OTHER; note = Methylphosphonate linkage
  misc_feature 1..32: note = RM110621

SEQ ID NO: 830 - DNA, 32 bp, synthetic construct; identical to SEQ ID NO: 19
  source 1..32: mol_type = other DNA
  misc_feature 19..20: note = DNA
  misc_feature order(1..18,21..32): note = RNA
  modified_base 18: mod_base = OTHER; note = 2-Prime-O-Methoxyethyl modified nucleoside
  modified_base 19: mod_base = OTHER; note = DNA nucleotide carrying a 6-amino-5-nitro-3-yl-2(1H)-pyridone nucleobase
  modified_base order(17,22..23): mod_base = OTHER; note = 2-Prime-Fluoro modified nucleoside
  modified_base order(1..16,21,24..32): mod_base = OTHER; note = 2-Prime-O-Methyl modified nucleoside
  modified_base order(1^2,31^32): mod_base = OTHER; note = (1,3-dimethylimidazolidin-2-ylidene) Phosphoramidate linkage
  modified_base order(2..20,21..31): mod_base = OTHER; note = Phosphorothioate linkage
  modified_base 20^21: mod_base = OTHER; note = Methylphosphonate linkage
  misc_feature 1..32: note = RM110622

SEQ ID NO: 831 - DNA, 32 bp, synthetic construct; identical to SEQ ID NO: 131
  source 1..32: mol_type = other DNA
  misc_feature 16..17: note = DNA
  misc_feature order(1..15,18..32): note = RNA
  modified_base 15: mod_base = OTHER; note = 2-Prime-O-Methoxyethyl modified nucleoside
  modified_base 16: mod_base = OTHER; note = DNA nucleotide carrying a 6-amino-5-nitro-3-yl-2(1H)-pyridone nucleobase
  modified_base order(14,19..20): mod_base = OTHER; note = 2-Prime-Fluoro modified nucleoside
  modified_base order(1..13,18,21..32): mod_base = OTHER; note = 2-Prime-O-Methyl modified nucleoside
  modified_base order(1^2,31^32): mod_base = OTHER; note = (1,3-dimethylimidazolidin-2-ylidene) Phosphoramidate linkage
  modified_base order(2..17,18..31): mod_base = OTHER; note = Phosphorothioate linkage
  modified_base 17^18: mod_base = OTHER; note = Methylphosphonate linkage
  misc_feature 1..32: note = RM110623

SEQ ID NO: 832 - DNA, 32 bp, synthetic construct; identical to SEQ ID NO: 132
  source 1..32: mol_type = other DNA
  misc_feature 13..14: note = DNA
  misc_feature order(1..12,15..32): note = RNA
  modified_base 12: mod_base = OTHER; note = 2-Prime-O-Methoxyethyl modified nucleoside
  modified_base 13: mod_base = OTHER; note = DNA nucleotide carrying a 6-amino-5-nitro-3-yl-2(1H)-pyridone nucleobase
  modified_base order(11,16..17): mod_base = OTHER; note = 2-Prime-Fluoro modified nucleoside
  modified_base order(1..10,15,18..32): mod_base = OTHER; note = 2-Prime-O-Methyl modified nucleoside
  modified_base order(1^2,31^32): mod_base = OTHER; note = (1,3-dimethylimidazolidin-2-ylidene) Phosphoramidate linkage
  modified_base order(2..14,15..31): mod_base = OTHER; note = Phosphorothioate linkage
  modified_base 14^15: mod_base = OTHER; note = Methylphosphonate linkage
  misc_feature 1..32: note = RM110624

SEQ ID NO: 833 - DNA, 32 bp, synthetic construct; identical to SEQ ID NO: 133
  source 1..32: mol_type = other DNA
  misc_feature 10..11: note = DNA
  misc_feature order(1..9,12..32): note = RNA
  modified_base 9: mod_base = OTHER; note = 2-Prime-O-Methoxyethyl modified nucleoside
  modified_base 10: mod_base = OTHER; note = DNA nucleotide carrying a 6-amino-5-nitro-3-yl-2(1H)-pyridone nucleobase
  modified_base order(8,13..14): mod_base = OTHER; note = 2-Prime-Fluoro modified nucleoside
  modified_base order(1..7,12,15..32): mod_base = OTHER; note = 2-Prime-O-Methyl modified nucleoside
  modified_base order(1^2,31^32): mod_base = OTHER; note = (1,3-dimethylimidazolidin-2-ylidene) Phosphoramidate linkage
  modified_base order(2..11,12..31): mod_base = OTHER; note = Phosphorothioate linkage
  modified_base 11^12: mod_base = OTHER; note = Methylphosphonate linkage
  misc_feature 1..32: note = RM110625

SEQ ID NO: 834 - DNA, 32 bp, synthetic construct; identical to SEQ ID NO: 134
  source 1..32: mol_type = other DNA
  misc_feature 7..8: note = DNA
  misc_feature order(1..6,9..32): note = RNA
  modified_base 6: mod_base = OTHER; note = 2-Prime-O-Methoxyethyl modified nucleoside
  modified_base 7: mod_base = OTHER; note = DNA nucleotide carrying a 6-amino-5-nitro-3-yl-2(1H)-pyridone nucleobase
  modified_base order(5,10..11): mod_base = OTHER; note = 2-Prime-Fluoro modified nucleoside
  modified_base order(1..4,9,12..32): mod_base = OTHER; note = 2-Prime-O-Methyl modified nucleoside
  modified_base order(1^2,31^32): mod_base = OTHER; note = (1,3-dimethylimidazolidin-2-ylidene) Phosphoramidate linkage
  modified_base order(2..8,9..31): mod_base = OTHER; note = Phosphorothioate linkage
  modified_base 8^9: mod_base = OTHER; note = Methylphosphonate linkage
  misc_feature 1..32: note = RM110626

SEQ ID NO: 835 - DNA, 29 bp, synthetic construct
  source 1..29: mol_type = other DNA
  misc_feature 18..19: note = DNA
  misc_feature order(1..17,20..29): note = RNA
  modified_base 17: mod_base = OTHER; note = 2-Prime-O-Methoxyethyl modified nucleoside
  modified_base 18: mod_base = OTHER; note = DNA nucleotide carrying a 6-amino-5-nitro-3-yl-2(1H)-pyridone nucleobase
  modified_base order(4,6,10,13,21..23,27): mod_base = OTHER; note = 2-Prime-Fluoro modified nucleoside
  modified_base order(1..3,5,7..9,11..12,14..16,20,24..26,28..29): mod_base = OTHER; note = 2-Prime-O-Methyl modified nucleoside
  modified_base order(1^2,28^29): mod_base = OTHER; note = (1,3-dimethylimidazolidin-2-ylidene) Phosphoramidate linkage
  modified_base order(2..19,20..28): mod_base = OTHER; note = Phosphorothioate linkage
  modified_base 19^20: mod_base = OTHER; note = Methylphosphonate linkage
  misc_feature 1..29: note = RM110627
ggtcaaacctctgaggantgggttcattt

SEQ ID NO: 836 - DNA, 29 bp, synthetic construct
  source 1..29: mol_type = other DNA
  misc_feature 15..16: note = DNA
  misc_feature order(1..14,17..29): note = RNA
  modified_base 14: mod_base = OTHER; note = 2-Prime-O-Methoxyethyl modified nucleoside
  modified_base 15: mod_base = OTHER; note = DNA nucleotide carrying a 6-amino-5-nitro-3-yl-2(1H)-pyridone nucleobase
  modified_base order(1,3,7,10,18..20,24): mod_base = OTHER; note = 2-Prime-Fluoro modified nucleoside
  modified_base order(2,4..6,8..9,11..13,17,21..23,25..29): mod_base = OTHER; note = 2-Prime-O-Methyl modified nucleoside
  modified_base order(1^2,28^29): mod_base = OTHER; note = (1,3-dimethylimidazolidin-2-ylidene) Phosphoramidate linkage
  modified_base order(2..16,17..28): mod_base = OTHER; note = Phosphorothioate linkage
  modified_base 16^17: mod_base = OTHER; note = Methylphosphonate linkage
  misc_feature 1..29: note = RM110628
caaacctctgaggantgggttcatttttc

SEQ ID NO: 837 - DNA, 29 bp, synthetic construct
  source 1..29: mol_type = other DNA
  misc_feature 12..13: note = DNA
  misc_feature order(1..11,14..29): note = RNA
  modified_base 11: mod_base = OTHER; note = 2-Prime-O-Methoxyethyl modified nucleoside
  modified_base 12: mod_base = OTHER; note = DNA nucleotide carrying a 6-amino-5-nitro-3-yl-2(1H)-pyridone nucleobase
  modified_base order(5,9..10,15,19,22,26,28): mod_base = OTHER; note = 2-Prime-Fluoro modified nucleoside
  modified_base order(1..4,6..8,14,16..18,20..21,23..25,27,29): mod_base = OTHER; note = 2-Prime-O-Methyl modified nucleoside
  modified_base order(1^2,28^29): mod_base = OTHER; note = (1,3-dimethylimidazolidin-2-ylidene) Phosphoramidate linkage
  modified_base order(2..13,14..28): mod_base = OTHER; note = Phosphorothioate linkage
  modified_base 13^14: mod_base = OTHER; note = Methylphosphonate linkage
  misc_feature 1..29: note = RM110629
acctctgaggantgggttcatttttcttg

SEQ ID NO: 838 - DNA, 29 bp, synthetic construct
  source 1..29: mol_type = other DNA
  misc_feature 9..10: note = DNA
  misc_feature order(1..8,11..29): note = RNA
  modified_base 8: mod_base = OTHER; note = 2-Prime-O-Methoxyethyl modified nucleoside
  modified_base 9: mod_base = OTHER; note = DNA nucleotide carrying a 6-amino-5-nitro-3-yl-2(1H)-pyridone nucleobase
  modified_base order(2,6..7,12,16,19,23,25): mod_base = OTHER; note = 2-Prime-Fluoro modified nucleoside
  modified_base order(1,3..5,11,13..15,17..18,20..22,24,26..29): mod_base = OTHER; note = 2-Prime-O-Methyl modified nucleoside
  modified_base order(1^2,28^29): mod_base = OTHER; note = (1,3-dimethylimidazolidin-2-ylidene) Phosphoramidate linkage
  modified_base order(2..10,11..28): mod_base = OTHER; note = Phosphorothioate linkage
  modified_base 10^11: mod_base = OTHER; note = Methylphosphonate linkage
  misc_feature 1..29: note = RM110630
tctgaggantgggttcatttttcttgtct

SEQ ID NO: 839 - DNA, 26 bp, synthetic construct
  source 1..26: mol_type = other DNA
  misc_feature 19..20: note = DNA
  misc_feature order(1..18,21..26): note = RNA
  modified_base 18: mod_base = OTHER; note = 2-Prime-O-Methoxyethyl modified nucleoside
  modified_base 19: mod_base = OTHER; note = DNA nucleotide carrying a 6-amino-5-nitro-3-yl-2(1H)-pyridone nucleobase
  modified_base order(11,14,22..24): mod_base = OTHER; note = 2-Prime-Fluoro modified nucleoside
  modified_base order(1..10,12..13,15..17,21,25..26): mod_base = OTHER; note = 2-Prime-O-Methyl modified nucleoside
  modified_base order(1^2,25^26): mod_base = OTHER; note = (1,3-dimethylimidazolidin-2-ylidene) Phosphoramidate linkage
  modified_base order(2..20,21..25): mod_base = OTHER; note = Phosphorothioate linkage
  modified_base 20^21: mod_base = OTHER; note = Methylphosphonate linkage
  misc_feature 1..26: note = RM110631
cggtcaaacctctgaggantgggttc

SEQ ID NO: 840 - DNA, 26 bp, synthetic construct
  source 1..26: mol_type = other DNA
  misc_feature 16..17: note = DNA
  misc_feature order(1..15,18..26): note = RNA
  modified_base 15: mod_base = OTHER; note = 2-Prime-O-Methoxyethyl modified nucleoside
  modified_base 16: mod_base = OTHER; note = DNA nucleotide carrying a 6-amino-5-nitro-3-yl-2(1H)-pyridone nucleobase
  modified_base order(8,11,19..21): mod_base = OTHER; note = 2-Prime-Fluoro modified nucleoside
  modified_base order(1..7,9..10,12..14,18,22..26): mod_base = OTHER; note = 2-Prime-O-Methyl modified nucleoside
  modified_base order(1^2,25^26): mod_base = OTHER; note = (1,3-dimethylimidazolidin-2-ylidene) Phosphoramidate linkage
  modified_base order(2..17,18..25): mod_base = OTHER; note = Phosphorothioate linkage
  modified_base 17^18: mod_base = OTHER; note = Methylphosphonate linkage
  misc_feature 1..26: note = RM110632
tcaaacctctgaggantgggttcatt

SEQ ID NO: 841 - DNA, 26 bp, synthetic construct
  source 1..26: mol_type = other DNA
  misc_feature 13..14: note = DNA
  misc_feature order(1..12,15..26): note = RNA
  modified_base 12: mod_base = OTHER; note = 2-Prime-O-Methoxyethyl modified nucleoside
  modified_base 13: mod_base = OTHER; note = DNA nucleotide carrying a 6-amino-5-nitro-3-yl-2(1H)-pyridone nucleobase
  modified_base order(5,8,16..18): mod_base = OTHER; note = 2-Prime-Fluoro modified nucleoside
  modified_base order(1..4,6..7,9..11,15,19..26): mod_base = OTHER; note = 2-Prime-O-Methyl modified nucleoside
  modified_base order(1^2,25^26): mod_base = OTHER; note = (1,3-dimethylimidazolidin-2-ylidene) Phosphoramidate linkage
  modified_base order(2..14,15..25): mod_base = OTHER; note = Phosphorothioate linkage
  modified_base 14^15: mod_base = OTHER; note = Methylphosphonate linkage
  misc_feature 1..26: note = RM110633
aacctctgaggantgggttcattttt

SEQ ID NO: 842 - DNA, 26 bp, synthetic construct
  source 1..26: mol_type = other DNA
  misc_feature 10..11: note = DNA
  misc_feature order(1..9,12..26): note = RNA
  modified_base 9: mod_base = OTHER; note = 2-Prime-O-Methoxyethyl modified nucleoside
  modified_base 10: mod_base = OTHER; note = DNA nucleotide carrying a 6-amino-5-nitro-3-yl-2(1H)-pyridone nucleobase
  modified_base order(2,5,13..15): mod_base = OTHER; note = 2-Prime-Fluoro modified nucleoside
  modified_base order(1,3..4,6..8,12,16..26): mod_base = OTHER; note = 2-Prime-O-Methyl modified nucleoside
  modified_base order(1^2,25^26): mod_base = OTHER; note = (1,3-dimethylimidazolidin-2-ylidene) Phosphoramidate linkage
  modified_base order(2..11,12..25): mod_base = OTHER; note = Phosphorothioate linkage
  modified_base 11^12: mod_base = OTHER; note = Methylphosphonate linkage
  misc_feature 1..26: note = RM110634
ctctgaggantgggttcatttttctt

SEQ ID NO: 843 - DNA, 29 bp, synthetic construct
  source 1..29: mol_type = other DNA
  misc_feature 24..25: note = DNA
  misc_feature order(1..23,26..29): note = RNA
  modified_base 23: mod_base = OTHER; note = 2-Prime-O-Methoxyethyl modified nucleoside
  modified_base 24: mod_base = OTHER; note = DNA nucleotide carrying a 6-amino-5-nitro-3-yl-2(1H)-pyridone nucleobase
  modified_base order(16,19,27..29): mod_base = OTHER; note = 2-Prime-Fluoro modified nucleoside
  modified_base order(1..15,17..18,20..22,26): mod_base = OTHER; note = 2-Prime-O-Methyl modified nucleoside
  modified_base order(1^2,28^29): mod_base = OTHER; note = (1,3-dimethylimidazolidin-2-ylidene) Phosphoramidate linkage
  modified_base order(2..25,26..28): mod_base = OTHER; note = Phosphorothioate linkage
  modified_base 25^26: mod_base = OTHER; note = Methylphosphonate linkage
  misc_feature 1..29: note = RM110635
caattcggtcaaacctctgaggantgggt

SEQ ID NO: 844 - DNA, 29 bp, synthetic construct
  source 1..29: mol_type = other DNA
  misc_feature 21..22: note = DNA
  misc_feature order(1..20,23..29): note = RNA
  modified_base 20: mod_base = OTHER; note = 2-Prime-O-Methoxyethyl modified nucleoside
  modified_base 21: mod_base = OTHER; note = DNA nucleotide carrying a 6-amino-5-nitro-3-yl-2(1H)-pyridone nucleobase
  modified_base order(13,16,24..26): mod_base = OTHER; note = 2-Prime-Fluoro modified nucleoside
  modified_base order(1..12,14..15,17..19,23,27..29): mod_base = OTHER; note = 2-Prime-O-Methyl modified nucleoside
  modified_base order(1^2,28^29): mod_base = OTHER; note = (1,3-dimethylimidazolidin-2-ylidene) Phosphoramidate linkage
  modified_base order(2..22,23..28): mod_base = OTHER; note = Phosphorothioate linkage
  modified_base 22^23: mod_base = OTHER; note = Methylphosphonate linkage
  misc_feature 1..29: note = RM110636
ttcggtcaaacctctgaggantgggttca

SEQ ID NO: 845 - DNA, 29 bp, synthetic construct
  source 1..29: mol_type = other DNA
  misc_feature 18..19: note = DNA
  misc_feature order(1..17,20..29): note = RNA
  modified_base 17: mod_base = OTHER; note = 2-Prime-O-Methoxyethyl modified nucleoside
  modified_base 18: mod_base = OTHER; note = DNA nucleotide carrying a 6-amino-5-nitro-3-yl-2(1H)-pyridone nucleobase
  modified_base order(10,13,21..23): mod_base = OTHER; note = 2-Prime-Fluoro modified nucleoside
  modified_base order(1..9,11..12,14..16,20,24..29): mod_base = OTHER; note = 2-Prime-O-Methyl modified nucleoside
  modified_base order(1^2,28^29): mod_base = OTHER; note = (1,3-dimethylimidazolidin-2-ylidene) Phosphoramidate linkage
  modified_base order(2..19,20..28): mod_base = OTHER; note = Phosphorothioate linkage
  modified_base 19^20: mod_base = OTHER; note = Methylphosphonate linkage
  misc_feature 1..29: note = RM110637
ggtcaaacctctgaggantgggttcattt

SEQ ID NO: 846 - DNA, 29 bp, synthetic construct
  source 1..29: mol_type = other DNA
  misc_feature 15..16: note = DNA
  misc_feature order(1..14,17..29): note = RNA
  modified_base 14: mod_base = OTHER; note = 2-Prime-O-Methoxyethyl modified nucleoside
  modified_base 15: mod_base = OTHER; note = DNA nucleotide carrying a 6-amino-5-nitro-3-yl-2(1H)-pyridone nucleobase
  modified_base order(7,10,18..20): mod_base = OTHER; note = 2-Prime-Fluoro modified nucleoside
  modified_base order(1..6,8..9,11..13,17,21..29): mod_base = OTHER; note = 2-Prime-O-Methyl modified nucleoside
  modified_base order(1^2,28^29): mod_base = OTHER; note = (1,3-dimethylimidazolidin-2-ylidene) Phosphoramidate linkage
  modified_base order(2..16,17..28): mod_base = OTHER; note = Phosphorothioate linkage
  modified_base 16^17: mod_base = OTHER; note = Methylphosphonate linkage
  misc_feature 1..29: note = RM110638
caaacctctgaggantgggttcatttttc

SEQ ID NO: 847 - DNA, 29 bp, synthetic construct
  source 1..29: mol_type = other DNA
  misc_feature 12..13: note = DNA
  misc_feature order(1..11,14..29): note = RNA
  modified_base 11: mod_base = OTHER; note = 2-Prime-O-Methoxyethyl modified nucleoside
  modified_base 12: mod_base = OTHER; note = DNA nucleotide carrying a 6-amino-5-nitro-3-yl-2(1H)-pyridone nucleobase
  modified_base order(4,7,15..17): mod_base = OTHER; note = 2-Prime-Fluoro modified nucleoside
  modified_base order(1..3,5..6,8..10,14,18..29): mod_base = OTHER; note = 2-Prime-O-Methyl modified nucleoside
  modified_base order(1^2,28^29): mod_base = OTHER; note = (1,3-dimethylimidazolidin-2-ylidene) Phosphoramidate linkage
  modified_base order(2..13,14..28): mod_base = OTHER; note = Phosphorothioate linkage
  modified_base 13^14: mod_base = OTHER; note = Methylphosphonate linkage
  misc_feature 1..29: note = RM110639
acctctgaggantgggttcatttttcttg

SEQ ID NO: 848 - DNA, 29 bp, synthetic construct
  source 1..29: mol_type = other DNA
  misc_feature 9..10: note = DNA
  misc_feature order(1..8,11..29): note = RNA
  modified_base 8: mod_base = OTHER; note = 2-Prime-O-Methoxyethyl modified nucleoside
  modified_base 9: mod_base = OTHER; note = DNA nucleotide carrying a 6-amino-5-nitro-3-yl-2(1H)-pyridone nucleobase
  modified_base order(1,4,12..14): mod_base = OTHER; note = 2-Prime-Fluoro modified nucleoside
  modified_base order(2..3,5..7,11,15..29): mod_base = OTHER; note = 2-Prime-O-Methyl modified nucleoside
  modified_base order(1^2,28^29): mod_base = OTHER; note = (1,3-dimethylimidazolidin-2-ylidene) Phosphoramidate linkage
  modified_base order(2..10,11..28): mod_base = OTHER; note = Phosphorothioate linkage
  modified_base 10^11: mod_base = OTHER; note = Methylphosphonate linkage
  misc_feature 1..29: note = RM110640
tctgaggantgggttcatttttcttgtct

SEQ ID NO: 849 - DNA, 26 bp, synthetic construct
  source 1..26: mol_type = other DNA
  misc_feature 16..17: note = DNA
  misc_feature order(1..15,18..26): note = RNA
  modified_base 15: mod_base = OTHER; note = 2-Prime-O-Methoxyethyl modified nucleoside
  modified_base 16: mod_base = OTHER; note = DNA nucleotide carrying a 6-amino-5-nitro-3-yl-2(1H)-pyridone nucleobase
  modified_base order(13..14,19,23,26): mod_base = OTHER; note = 2-Prime-Fluoro modified nucleoside
  modified_base order(1..12,18,20..22,24..25): mod_base = OTHER; note = 2-Prime-O-Methyl modified nucleoside
  modified_base order(1^2,25^26): mod_base = OTHER; note = (1,3-dimethylimidazolidin-2-ylidene) Phosphoramidate linkage
  modified_base order(2..17,18..25): mod_base = OTHER; note = Phosphorothioate linkage
  modified_base 17^18: mod_base = OTHER; note = Methylphosphonate linkage
  misc_feature 1..26: note = RM110641
tcaaacctctgaggantgggttcatt

SEQ ID NO: 850 - DNA, 26 bp, synthetic construct
  source 1..26: mol_type = other DNA
  misc_feature 13..14: note = DNA
  misc_feature order(1..12,15..26): note = RNA
  modified_base 12: mod_base = OTHER; note = 2-Prime-O-Methoxyethyl modified nucleoside
  modified_base 13: mod_base = OTHER; note = DNA nucleotide carrying a 6-amino-5-nitro-3-yl-2(1H)-pyridone nucleobase
  modified_base order(10..11,16,20,23): mod_base = OTHER; note = 2-Prime-Fluoro modified nucleoside
  modified_base order(1..9,15,17..19,21..22,24..26): mod_base = OTHER; note = 2-Prime-O-Methyl modified nucleoside
  modified_base order(1^2,25^26): mod_base = OTHER; note = (1,3-dimethylimidazolidin-2-ylidene) Phosphoramidate linkage
  modified_base order(2..14,15..25): mod_base = OTHER; note = Phosphorothioate linkage
  modified_base 14^15: mod_base = OTHER; note = Methylphosphonate linkage
  misc_feature 1..26: note = RM110642
aacctctgaggantgggttcattttt

SEQ ID NO: 851 - DNA, 26 bp, synthetic construct
  source 1..26: mol_type = other DNA
  misc_feature 10..11: note = DNA
  misc_feature order(1..9,12..26): note = RNA
  modified_base 9: mod_base = OTHER; note = 2-Prime-O-Methoxyethyl modified nucleoside
  modified_base 10: mod_base = OTHER; note = DNA nucleotide carrying a 6-amino-5-nitro-3-yl-2(1H)-pyridone nucleobase
  modified_base order(7..8,13,17,20): mod_base = OTHER; note = 2-Prime-Fluoro modified nucleoside
  modified_base order(1..6,12,14..16,18..19,21..26): mod_base = OTHER; note = 2-Prime-O-Methyl modified nucleoside
  modified_base order(1^2,25^26): mod_base = OTHER; note = (1,3-dimethylimidazolidin-2-ylidene) Phosphoramidate linkage
  modified_base order(2..11,12..25): mod_base = OTHER; note = Phosphorothioate linkage
  modified_base 11^12: mod_base = OTHER; note = Methylphosphonate linkage
  misc_feature 1..26: note = RM110643
ctctgaggantgggttcatttttctt

SEQ ID NO: 852 - DNA, 26 bp, synthetic construct
  source 1..26: mol_type = other DNA
  misc_feature 7..8: note = DNA
  misc_feature order(1..6,9..26): note = RNA
  modified_base 6: mod_base = OTHER; note = 2-Prime-O-Methoxyethyl modified nucleoside
  modified_base 7: mod_base = OTHER; note = DNA nucleotide carrying a 6-amino-5-nitro-3-yl-2(1H)-pyridone nucleobase
  modified_base order(4..5,10,14,17): mod_base = OTHER; note = 2-Prime-Fluoro modified nucleoside
  modified_base order(1..3,9,11..13,15..16,18..26): mod_base = OTHER; note = 2-Prime-O-Methyl modified nucleoside
  modified_base order(1^2,25^26): mod_base = OTHER; note = (1,3-dimethylimidazolidin-2-ylidene) Phosphoramidate linkage
  modified_base order(2..8,9..25): mod_base = OTHER; note = Phosphorothioate linkage
  modified_base 8^9: mod_base = OTHER; note = Methylphosphonate linkage
  misc_feature 1..26: note = RM110644
tgaggantgggttcatttttcttgtc

SEQ ID NO: 853 - DNA, 29 bp, synthetic construct
  source 1..29: mol_type = other DNA
  misc_feature 18..19: note = DNA
  misc_feature order(1..17,20..29): note = RNA
  modified_base 17: mod_base = OTHER; note = 2-Prime-O-Methoxyethyl modified nucleoside
  modified_base 18: mod_base = OTHER; note = DNA nucleotide carrying a 6-amino-5-nitro-3-yl-2(1H)-pyridone nucleobase
  modified_base order(15..16,21,25,28): mod_base = OTHER; note = 2-Prime-Fluoro modified nucleoside
  modified_base order(1..14,20,22..24,26..27,29): mod_base = OTHER; note = 2-Prime-O-Methyl modified nucleoside
  modified_base order(1^2,28^29): mod_base = OTHER; note = (1,3-dimethylimidazolidin-2-ylidene) Phosphoramidate linkage
  modified_base order(2..19,20..28): mod_base = OTHER; note = Phosphorothioate linkage
  modified_base 19^20: mod_base = OTHER; note = Methylphosphonate linkage
  misc_feature 1..29: note = RM110645
ggtcaaacctctgaggantgggttcattt

SEQ ID NO: 854 - DNA, 29 bp, synthetic construct
  source 1..29: mol_type = other DNA
  misc_feature 15..16: note = DNA
  misc_feature order(1..14,17..29): note = RNA
  modified_base 14: mod_base = OTHER; note = 2-Prime-O-Methoxyethyl modified nucleoside
  modified_base 15: mod_base = OTHER; note = DNA nucleotide carrying a 6-amino-5-nitro-3-yl-2(1H)-pyridone nucleobase
  modified_base order(12..13,18,22,25): mod_base = OTHER; note = 2-Prime-Fluoro modified nucleoside
  modified_base order(1..11,17,19..21,23..24,26..29): mod_base = OTHER; note = 2-Prime-O-Methyl modified nucleoside
  modified_base order(1^2,28^29): mod_base = OTHER; note = (1,3-dimethylimidazolidin-2-ylidene) Phosphoramidate linkage
  modified_base order(2..16,17..28): mod_base = OTHER; note = Phosphorothioate linkage
  modified_base 16^17: mod_base = OTHER; note = Methylphosphonate linkage
  misc_feature 1..29: note = RM110646
caaacctctgaggantgggttcatttttc

SEQ ID NO: 855 - DNA, 29 bp, synthetic construct
  source 1..29: mol_type = other DNA
  misc_feature 12..13: note = DNA
  misc_feature order(1..11,14..29): note = RNA
  modified_base 11: mod_base = OTHER; note = 2-Prime-O-Methoxyethyl modified nucleoside
  modified_base 12: mod_base = OTHER; note = DNA nucleotide carrying a 6-amino-5-nitro-3-yl-2(1H)-pyridone nucleobase
  modified_base order(9..10,15,19,22): mod_base = OTHER; note = 2-Prime-Fluoro modified nucleoside
  modified_base order(1..8,14,16..18,20..21,23..29): mod_base = OTHER; note = 2-Prime-O-Methyl modified nucleoside
  modified_base order(1^2,28^29): mod_base = OTHER; note = (1,3-dimethylimidazolidin-2-ylidene) Phosphoramidate linkage
  modified_base order(2..13,14..28): mod_base = OTHER; note = Phosphorothioate linkage
  modified_base 13^14: mod_base = OTHER; note = Methylphosphonate linkage
  misc_feature 1..29: note = RM110647
acctctgaggantgggttcatttttcttg

SEQ ID NO: 856 - DNA, 29 bp, synthetic construct
  source 1..29: mol_type = other DNA
  misc_feature 9..10: note = DNA
  misc_feature order(1..8,11..29): note = RNA
  modified_base 8: mod_base = OTHER; note = 2-Prime-O-Methoxyethyl modified nucleoside
  modified_base 9: mod_base = OTHER; note = DNA nucleotide carrying a 6-amino-5-nitro-3-yl-2(1H)-pyridone nucleobase
  modified_base order(6..7,12,16,19): mod_base = OTHER; note = 2-Prime-Fluoro modified nucleoside
  modified_base order(1..5,11,13..15,17..18,20..29): mod_base = OTHER; note = 2-Prime-O-Methyl modified nucleoside
  modified_base order(1^2,28^29): mod_base = OTHER; note = (1,3-dimethylimidazolidin-2-ylidene) Phosphoramidate linkage
  modified_base order(2..10,11..28): mod_base = OTHER; note = Phosphorothioate linkage
  modified_base 10^11: mod_base = OTHER; note = Methylphosphonate linkage
  misc_feature 1..29: note = RM110648
tctgaggantgggttcatttttcttgtct

SEQ ID NO: 857 - DNA, 29 bp, synthetic construct
  source 1..29: mol_type = other DNA
  misc_feature 6..7: note = DNA
  misc_feature order(1..5,8..29): note = RNA
  modified_base 5: mod_base = OTHER; note = 2-Prime-O-Methoxyethyl modified nucleoside
  modified_base 6: mod_base = OTHER; note = DNA nucleotide carrying a 6-amino-5-nitro-3-yl-2(1H)-pyridone nucleobase
  modified_base order(3..4,9,13,16): mod_base = OTHER; note = 2-Prime-Fluoro modified nucleoside
  modified_base order(1..2,8,10..12,14..15,17..29): mod_base = OTHER; note = 2-Prime-O-Methyl modified nucleoside
  modified_base order(1^2,28^29): mod_base = OTHER; note = (1,3-dimethylimidazolidin-2-ylidene) Phosphoramidate linkage
  modified_base order(2..7,8..28): mod_base = OTHER; note = Phosphorothioate linkage
  modified_base 7^8: mod_base = OTHER; note = Methylphosphonate linkage
  misc_feature 1..29: note = RM110649
gaggantgggttcatttttcttgtctctt

SEQ ID NO: 858 - DNA, 32 bp, synthetic construct; identical to SEQ ID NO: 127
  source 1..32: mol_type = other DNA
  misc_feature 28..29: note = DNA
  misc_feature order(1..27,30..32): note = RNA
  modified_base 27: mod_base = OTHER; note = 2-Prime-O-Methoxyethyl modified nucleoside
  modified_base 28: mod_base = OTHER; note = DNA nucleotide carrying a 6-amino-5-nitro-3-yl-2(1H)-pyridone nucleobase
  modified_base order(8,12,15..16,23,31): mod_base = OTHER; note = 2-Prime-Fluoro modified nucleoside
  modified_base order(1..7,9..11,13..14,17..22,24..26,30,32): mod_base = OTHER; note = 2-Prime-O-Methyl modified nucleoside
  modified_base order(1^2,31^32): mod_base = OTHER; note = (1,3-dimethylimidazolidin-2-ylidene) Phosphoramidate linkage
  modified_base order(2..29,30^31): mod_base = OTHER; note = Phosphorothioate linkage
  modified_base 29^30: mod_base = OTHER; note = Methylphosphonate linkage
  misc_feature 1..32: note = RM110650

SEQ ID NO: 859 - DNA, 32 bp, synthetic construct; identical to SEQ ID NO: 128
  source 1..32: mol_type = other DNA
  misc_feature 25..26: note = DNA
  misc_feature order(1..24,27..32): note = RNA
  modified_base 24: mod_base = OTHER; note = 2-Prime-O-Methoxyethyl modified nucleoside
  modified_base 25: mod_base = OTHER; note = DNA nucleotide carrying a 6-amino-5-nitro-3-yl-2(1H)-pyridone nucleobase
  modified_base order(5,9,12..13,20,28): mod_base = OTHER; note = 2-Prime-Fluoro modified nucleoside
  modified_base order(1..4,6..8,10..11,14..19,21..23,27,29..32): mod_base = OTHER; note = 2-Prime-O-Methyl modified nucleoside
  modified_base order(1^2,31^32): mod_base = OTHER; note = (1,3-dimethylimidazolidin-2-ylidene) Phosphoramidate linkage
  modified_base order(2..26,27..31): mod_base = OTHER; note = Phosphorothioate linkage
  modified_base 26^27: mod_base = OTHER; note = Methylphosphonate linkage
  misc_feature 1..32: note = RM110651

SEQ ID NO: 860 - DNA, 32 bp, synthetic construct; identical to SEQ ID NO: 129
  source 1..32: mol_type = other DNA
  misc_feature 22..23: note = DNA
  misc_feature order(1..21,24..32): note = RNA
  modified_base 21: mod_base = OTHER; note = 2-Prime-O-Methoxyethyl modified nucleoside
  modified_base 22: mod_base = OTHER; note = DNA nucleotide carrying a 6-amino-5-nitro-3-yl-2(1H)-pyridone nucleobase
  modified_base order(2,6,9..10,17,25): mod_base = OTHER; note = 2-Prime-Fluoro modified nucleoside
  modified_base order(1,3..5,7..8,11..16,18..20,24,26..32): mod_base = OTHER; note = 2-Prime-O-Methyl modified nucleoside
  modified_base order(1^2,31^32): mod_base = OTHER; note = (1,3-dimethylimidazolidin-2-ylidene) Phosphoramidate linkage
  modified_base order(2..23,24..31): mod_base = OTHER; note = Phosphorothioate linkage
  modified_base 23^24: mod_base = OTHER; note = Methylphosphonate linkage
  misc_feature 1..32: note = RM110652

SEQ ID NO: 861 - DNA, 23 bp, synthetic construct
  source 1..23: mol_type = other DNA
  misc_feature 18..19: note = DNA
  misc_feature order(1..17,20..23): note = RNA
  modified_base 17: mod_base = OTHER; note = 2-Prime-O-Methoxyethyl modified nucleoside
  modified_base 18: mod_base = OTHER; note = DNA nucleotide carrying a 6-amino-5-nitro-3-yl-2(1H)-pyridone nucleobase
  modified_base order(5..6,13,21): mod_base = OTHER; note = 2-Prime-Fluoro modified nucleoside
  modified_base order(1..4,7..12,14..16,20,22..23): mod_base = OTHER; note = 2-Prime-O-Methyl modified nucleoside
  modified_base order(1^2,22^23): mod_base = OTHER; note = (1,3-dimethylimidazolidin-2-ylidene) Phosphoramidate linkage
  modified_base order(2..19,20..22): mod_base = OTHER; note = Phosphorothioate linkage
  modified_base 19^20: mod_base = OTHER; note = Methylphosphonate linkage
  misc_feature 1..23: note = RM110653
ggtcaaacctctgaggantgggt

SEQ ID NO: 862 - DNA, 23 bp, synthetic construct
  source 1..23: mol_type = other DNA
  misc_feature 15..16: note = DNA
  misc_feature order(1..14,17..23): note = RNA
  modified_base 14: mod_base = OTHER; note = 2-Prime-O-Methoxyethyl modified nucleoside
  modified_base 15: mod_base = OTHER; note = DNA nucleotide carrying a 6-amino-5-nitro-3-yl-2(1H)-pyridone nucleobase
  modified_base order(2..3,10,18): mod_base = OTHER; note = 2-Prime-Fluoro modified nucleoside
  modified_base order(1,4..9,11..13,17,19..23): mod_base = OTHER; note = 2-Prime-O-Methyl modified nucleoside
  modified_base order(1^2,22^23): mod_base = OTHER; note = (1,3-dimethylimidazolidin-2-ylidene) Phosphoramidate linkage
  modified_base order(2..16,17..22): mod_base = OTHER; note = Phosphorothioate linkage
  modified_base 16^17: mod_base = OTHER; note = Methylphosphonate linkage
  misc_feature 1..23: note = RM110654
caaacctctgaggantgggttca

SEQ ID NO: 863 - DNA, 32 bp, synthetic construct; identical to SEQ ID NO: 19
  source 1..32: mol_type = other DNA
  misc_feature 19..20: note = DNA
  misc_feature order(1..18,21..32): note = RNA
  modified_base 18: mod_base = OTHER; note = 2-Prime-O-Methoxyethyl modified nucleoside
  modified_base 19: mod_base = OTHER; note = DNA nucleotide carrying a 6-amino-5-nitro-3-yl-2(1H)-pyridone nucleobase
  modified_base order(6,9,12..13,17,22,27,30..31): mod_base = OTHER; note = 2-Prime-Fluoro modified nucleoside
  modified_base order(1..5,7..8,10..11,14..16,21,23..26,28..29,32): mod_base = OTHER; note = 2-Prime-O-Methyl modified nucleoside
  modified_base order(1^2,31^32): mod_base = OTHER; note = (1,3-dimethylimidazolidin-2-ylidene) Phosphoramidate linkage
  modified_base order(2..20,21..31): mod_base = OTHER; note = Phosphorothioate linkage
  modified_base 20^21: mod_base = OTHER; note = Methylphosphonate linkage
  misc_feature 1..32: note = RM110655

SEQ ID NO: 864 - DNA, 32 bp, synthetic construct; identical to SEQ ID NO: 131
  source 1..32: mol_type = other DNA
  misc_feature 16..17: note = DNA
  misc_feature order(1..15,18..32): note = RNA
  modified_base 15: mod_base = OTHER; note = 2-Prime-O-Methoxyethyl modified nucleoside
  modified_base 16: mod_base = OTHER; note = DNA nucleotide carrying a 6-amino-5-nitro-3-yl-2(1H)-pyridone nucleobase
  modified_base order(3,6,9..10,14,19,24,27..28): mod_base = OTHER; note = 2-Prime-Fluoro modified nucleoside
  modified_base order(1..2,4..5,7..8,11..13,18,20..23,25..26,29..32): mod_base = OTHER; note = 2-Prime-O-Methyl modified nucleoside
  modified_base order(1^2,31^32): mod_base = OTHER; note = (1,3-dimethylimidazolidin-2-ylidene) Phosphoramidate linkage
  modified_base order(2..17,18..31): mod_base = OTHER; note = Phosphorothioate linkage
  modified_base 17^18: mod_base = OTHER; note = Methylphosphonate linkage
  misc_feature 1..32: note = RM110656

SEQ ID NO: 865 - DNA, 32 bp, synthetic construct; identical to SEQ ID NO: 131
  source 1..32: mol_type = other DNA
  misc_feature 16..17: note = DNA
  misc_feature order(1..15,18..32): note = RNA
  modified_base 15: mod_base = OTHER; note = 2-Prime-O-Methoxyethyl modified nucleoside
  modified_base 16: mod_base = OTHER; note = DNA nucleotide carrying a 6-amino-5-nitro-3-yl-2(1H)-pyridone nucleobase
  modified_base order(6..7,10,19..20,24..25,28,31): mod_base = OTHER; note = 2-Prime-Fluoro modified nucleoside
  modified_base order(1..5,8..9,11..14,18,21..23,26..27,29..30,32): mod_base = OTHER; note = 2-Prime-O-Methyl modified nucleoside
  modified_base order(1^2,31^32): mod_base = OTHER; note = (1,3-dimethylimidazolidin-2-ylidene) Phosphoramidate linkage
  modified_base order(2..17,18..31): mod_base = OTHER; note = Phosphorothioate linkage
  modified_base 17^18: mod_base = OTHER; note = Methylphosphonate linkage
  misc_feature 1..32: note = RM110657

SEQ ID NO: 866 - DNA, 32 bp, synthetic construct; identical to SEQ ID NO: 132
  source 1..32: mol_type = other DNA
  misc_feature 13..14: note = DNA
  misc_feature order(1..12,15..32): note = RNA
  modified_base 12: mod_base = OTHER; note = 2-Prime-O-Methoxyethyl modified nucleoside
  modified_base 13: mod_base = OTHER; note = DNA nucleotide carrying a 6-amino-5-nitro-3-yl-2(1H)-pyridone nucleobase
  modified_base order(3..4,7,16..17,21..22,25,28): mod_base = OTHER; note = 2-Prime-Fluoro modified nucleoside
  modified_base order(1..2,5..6,8..11,15,18..20,23..24,26..27,29..32): mod_base = OTHER; note = 2-Prime-O-Methyl modified nucleoside
  modified_base order(1^2,31^32): mod_base = OTHER; note = (1,3-dimethylimidazolidin-2-ylidene) Phosphoramidate linkage
  modified_base order(2..14,15..31): mod_base = OTHER; note = Phosphorothioate linkage
  modified_base 14^15: mod_base = OTHER; note = Methylphosphonate linkage
  misc_feature 1..32: note = RM110658

SEQ ID NO: 867 - DNA, 23 bp, synthetic construct
  source 1..23: mol_type = other DNA
  misc_feature 15..16: note = DNA
  misc_feature order(1..14,17..23): note = RNA
  modified_base 14: mod_base = OTHER; note = 2-Prime-O-Methoxyethyl modified nucleoside
  modified_base 15: mod_base = OTHER; note = DNA nucleotide carrying a 6-amino-5-nitro-3-yl-2(1H)-pyridone nucleobase
  modified_base order(5,8..9,13,18,23): mod_base = OTHER; note = 2-Prime-Fluoro modified nucleoside
  modified_base order(1..4,6..7,10..12,17,19..22): mod_base = OTHER; note = 2-Prime-O-Methyl modified nucleoside
  modified_base order(1^2,22^23): mod_base = OTHER; note = (1,3-dimethylimidazolidin-2-ylidene) Phosphoramidate linkage
  modified_base order(2..16,17..22): mod_base = OTHER; note = Phosphorothioate linkage
  modified_base 16^17: mod_base = OTHER; note = Methylphosphonate linkage
  misc_feature 1..23: note = RM110659
caaacctctgaggantgggttca

SEQ ID NO: 868 - DNA, 23 bp, synthetic construct
  source 1..23: mol_type = other DNA
  misc_feature 12..13: note = DNA
  misc_feature order(1..11,14..23): note = RNA
  modified_base 11: mod_base = OTHER; note = 2-Prime-O-Methoxyethyl modified nucleoside
  modified_base 12: mod_base = OTHER; note = DNA nucleotide carrying a 6-amino-5-nitro-3-yl-2(1H)-pyridone nucleobase
  modified_base order(2,5..6,10,15,20): mod_base = OTHER; note = 2-Prime-Fluoro modified nucleoside
  modified_base order(1,3..4,7..9,14,16..19,21..23): mod_base = OTHER; note = 2-Prime-O-Methyl modified nucleoside
  modified_base order(1^2,22^23): mod_base = OTHER; note = (1,3-dimethylimidazolidin-2-ylidene) Phosphoramidate linkage
  modified_base order(2..13,14..22): mod_base = OTHER; note = Phosphorothioate linkage
  modified_base 13^14: mod_base = OTHER; note = Methylphosphonate linkage
  misc_feature 1..23: note = RM110660
acctctgaggantgggttcattt

SEQ ID NO: 869 - DNA, 32 bp, synthetic construct; identical to SEQ ID NO: 129
  source 1..32: mol_type = other DNA
  misc_feature 22..23: note = DNA
  misc_feature order(1..21,24..32): note = RNA
  modified_base 21: mod_base = OTHER; note = 2-Prime-O-Methoxyethyl modified nucleoside
  modified_base 22: mod_base = OTHER; note = DNA nucleotide carrying a 6-amino-5-nitro-3-yl-2(1H)-pyridone nucleobase
  modified_base order(12,15..16,20,25,30): mod_base = OTHER; note = 2-Prime-Fluoro modified nucleoside
  modified_base order(1..11,13..14,17..19,24,26..29,31..32): mod_base = OTHER; note = 2-Prime-O-Methyl modified nucleoside
  modified_base order(1^2,31^32): mod_base = OTHER; note = (1,3-dimethylimidazolidin-2-ylidene) Phosphoramidate linkage
  modified_base order(2..23,24..31): mod_base = OTHER; note = Phosphorothioate linkage
  modified_base 23^24: mod_base = OTHER; note = Methylphosphonate linkage
  misc_feature 1..32: note = RM110661

SEQ ID NO: 870 - DNA, 32 bp, synthetic construct; identical to SEQ ID NO: 19
  source 1..32: mol_type = other DNA
  misc_feature 19..20: note = DNA
  misc_feature order(1..18,21..32): note = RNA
  modified_base 18: mod_base = OTHER; note = 2-Prime-O-Methoxyethyl modified nucleoside
  modified_base 19: mod_base = OTHER; note = DNA nucleotide carrying a 6-amino-5-nitro-3-yl-2(1H)-pyridone nucleobase
  modified_base order(9,12..13,17,22,27): mod_base = OTHER; note = 2-Prime-Fluoro modified nucleoside
  modified_base order(1..8,10..11,14..16,21,23..26,28..32): mod_base = OTHER; note = 2-Prime-O-Methyl modified nucleoside
  modified_base order(1^2,31^32): mod_base = OTHER; note = (1,3-dimethylimidazolidin-2-ylidene) Phosphoramidate linkage
  modified_base order(2..20,21..31): mod_base = OTHER; note = Phosphorothioate linkage
  modified_base 20^21: mod_base = OTHER; note = Methylphosphonate linkage
  misc_feature 1..32: note = RM110662

SEQ ID NO: 871 - DNA, 32 bp, synthetic construct; identical to SEQ ID NO: 131
  source 1..32: mol_type = other DNA
  misc_feature 16..17: note = DNA
  misc_feature order(1..15,18..32): note = RNA
  modified_base 15: mod_base = OTHER; note = 2-Prime-O-Methoxyethyl modified nucleoside
  modified_base 16: mod_base = OTHER; note = DNA nucleotide carrying a 6-amino-5-nitro-3-yl-2(1H)-pyridone nucleobase
  modified_base order(6,9..10,14,19,24): mod_base = OTHER; note = 2-Prime-Fluoro modified nucleoside
  modified_base order(1..5,7..8,11..13,18,20..23,25..32): mod_base = OTHER; note = 2-Prime-O-Methyl modified nucleoside
  modified_base order(1^2,31^32): mod_base = OTHER; note = (1,3-dimethylimidazolidin-2-ylidene) Phosphoramidate linkage
  modified_base order(2..17,18..31): mod_base = OTHER; note = Phosphorothioate linkage
  modified_base 17^18: mod_base = OTHER; note = Methylphosphonate linkage
  misc_feature 1..32: note = RM110663

SEQ ID NO: 872 - DNA, 32 bp, synthetic construct; identical to SEQ ID NO: 132
  source 1..32: mol_type = other DNA
  misc_feature 13..14: note = DNA
  misc_feature order(1..12,15..32): note = RNA
  modified_base 12: mod_base = OTHER; note = 2-Prime-O-Methoxyethyl modified nucleoside
  modified_base 13: mod_base = OTHER; note = DNA nucleotide carrying a 6-amino-5-nitro-3-yl-2(1H)-pyridone nucleobase
  modified_base order(3,6..7,11,16,21): mod_base = OTHER; note = 2-Prime-Fluoro modified nucleoside
  modified_base order(1..2,4..5,8..10,15,17..20,22..32): mod_base = OTHER; note = 2-Prime-O-Methyl modified nucleoside
  modified_base order(1^2,31^32): mod_base = OTHER; note = (1,3-dimethylimidazolidin-2-ylidene) Phosphoramidate linkage
  modified_base order(2..14,15..31): mod_base = OTHER; note = Phosphorothioate linkage
  modified_base 14^15: mod_base = OTHER; note = Methylphosphonate linkage
  misc_feature 1..32: note = RM110664

SEQ ID NO: 873 - DNA, 23 bp, synthetic construct
  source 1..23: mol_type = other DNA
  misc_feature 9..10: note = DNA
  misc_feature order(1..8,11..23): note = RNA
  modified_base 8: mod_base = OTHER; note = 2-Prime-O-Methoxyethyl modified nucleoside
  modified_base 9: mod_base = OTHER; note = DNA nucleotide carrying a 6-amino-5-nitro-3-yl-2(1H)-pyridone nucleobase
  modified_base order(3,12..13,17..18,21): mod_base = OTHER; note = 2-Prime-Fluoro modified nucleoside
  modified_base order(1..2,4..7,11,14..16,19..20,22..23): mod_base = OTHER; note = 2-Prime-O-Methyl modified nucleoside
  modified_base order(1^2,22^23): mod_base = OTHER; note = (1,3-dimethylimidazolidin-2-ylidene) Phosphoramidate linkage
  modified_base order(2..10,11..22): mod_base = OTHER; note = Phosphorothioate linkage
  modified_base 10^11: mod_base = OTHER; note = Methylphosphonate linkage
  misc_feature 1..23: note = RM110665
tctgaggantgggttcatttttc

SEQ ID NO: 874 - DNA, 32 bp, synthetic construct; identical to SEQ ID NO: 19
  source 1..32: mol_type = other DNA
  misc_feature 19..20: note = DNA
  misc_feature order(1..18,21..32): note = RNA
  modified_base 18: mod_base = OTHER; note = 2-Prime-O-Methoxyethyl modified nucleoside
  modified_base 19: mod_base = OTHER; note = DNA nucleotide carrying a 6-amino-5-nitro-3-yl-2(1H)-pyridone nucleobase
  modified_base order(13,22..23,27..28,31): mod_base = OTHER; note = 2-Prime-Fluoro modified nucleoside
  modified_base order(1..12,14..17,21,24..26,29..30,32): mod_base = OTHER; note = 2-Prime-O-Methyl modified nucleoside
  modified_base order(1^2,31^32): mod_base = OTHER; note = (1,3-dimethylimidazolidin-2-ylidene) Phosphoramidate linkage
  modified_base order(2..20,21..31): mod_base = OTHER; note = Phosphorothioate linkage
  modified_base 20^21: mod_base = OTHER; note = Methylphosphonate linkage
  misc_feature 1..32: note = RM110666

SEQ ID NO: 875 - DNA, 32 bp, synthetic construct; identical to SEQ ID NO: 131
  source 1..32: mol_type = other DNA
  misc_feature 16..17: note = DNA
  misc_feature order(1..15,18..32): note = RNA
  modified_base 15: mod_base = OTHER; note = 2-Prime-O-Methoxyethyl modified nucleoside
  modified_base 16: mod_base = OTHER; note = DNA nucleotide carrying a 6-amino-5-nitro-3-yl-2(1H)-pyridone nucleobase
  modified_base order(10,19..20,24..25,28): mod_base = OTHER; note = 2-Prime-Fluoro modified nucleoside
  modified_base order(1..9,11..14,18,21..23,26..27,29..32): mod_base = OTHER; note = 2-Prime-O-Methyl modified nucleoside
  modified_base order(1^2,31^32): mod_base = OTHER; note = (1,3-dimethylimidazolidin-2-ylidene) Phosphoramidate linkage
  modified_base order(2..17,18..31): mod_base = OTHER; note = Phosphorothioate linkage
  modified_base 17^18: mod_base = OTHER; note = Methylphosphonate linkage
  misc_feature 1..32: note = RM110667

SEQ ID NO: 876 - DNA, 32 bp, synthetic construct; identical to SEQ ID NO: 132
  source 1..32: mol_type = other DNA
  misc_feature 13..14: note = DNA
  misc_feature order(1..12,15..32): note = RNA
  modified_base 12: mod_base = OTHER; note = 2-Prime-O-Methoxyethyl modified nucleoside
  modified_base 13: mod_base = OTHER; note = DNA nucleotide carrying a 6-amino-5-nitro-3-yl-2(1H)-pyridone nucleobase
  modified_base order(7,16..17,21..22,25): mod_base = OTHER; note = 2-Prime-Fluoro modified nucleoside
  modified_base order(1..6,8..11,15,18..20,23..24,26..32): mod_base = OTHER; note = 2-Prime-O-Methyl modified nucleoside
  modified_base order(1^2,31^32): mod_base = OTHER; note = (1,3-dimethylimidazolidin-2-ylidene) Phosphoramidate linkage
  modified_base order(2..14,15..31): mod_base = OTHER; note = Phosphorothioate linkage
  modified_base 14^15: mod_base = OTHER; note = Methylphosphonate linkage
  misc_feature 1..32: note = RM110668

SEQ ID NO: 877 - DNA, 32 bp, synthetic construct; identical to SEQ ID NO: 133
  source 1..32: mol_type = other DNA
  misc_feature 10..11: note = DNA
  misc_feature order(1..9,12..32): note = RNA
  modified_base 9: mod_base = OTHER; note = 2-Prime-O-Methoxyethyl modified nucleoside
  modified_base 10: mod_base = OTHER; note = DNA nucleotide carrying a 6-amino-5-nitro-3-yl-2(1H)-pyridone nucleobase
  modified_base order(4,13..14,18..19,22): mod_base = OTHER; note = 2-Prime-Fluoro modified nucleoside
  modified_base order(1..3,5..8,12,15..17,20..21,23..32): mod_base = OTHER; note = 2-Prime-O-Methyl modified nucleoside
  modified_base order(1^2,31^32): mod_base = OTHER; note = (1,3-dimethylimidazolidin-2-ylidene) Phosphoramidate linkage
  modified_base order(2..11,12..31): mod_base = OTHER; note = Phosphorothioate linkage
  modified_base 11^12: mod_base = OTHER; note = Methylphosphonate linkage
  misc_feature 1..32: note = RM110669

SEQ ID NO: 878 - DNA, 32 bp, synthetic construct; identical to SEQ ID NO: 134
  source 1..32: mol_type = other DNA
  misc_feature 7..8: note = DNA
  misc_feature order(1..6,9..32): note = RNA
  modified_base 6: mod_base = OTHER; note = 2-Prime-O-Methoxyethyl modified nucleoside
  modified_base 7: mod_base = OTHER; note = DNA nucleotide carrying a 6-amino-5-nitro-3-yl-2(1H)-pyridone nucleobase
  modified_base order(1,10..11,15..16,19): mod_base = OTHER; note = 2-Prime-Fluoro modified nucleoside
  modified_base order(2..5,9,12..14,17..18,20..32): mod_base = OTHER; note = 2-Prime-O-Methyl modified nucleoside
  modified_base order(1^2,31^32): mod_base = OTHER; note = (1,3-dimethylimidazolidin-2-ylidene) Phosphoramidate linkage
  modified_base order(2..8,9..31): mod_base = OTHER; note = Phosphorothioate linkage
  modified_base 8^9: mod_base = OTHER; note = Methylphosphonate linkage
  misc_feature 1..32: note = RM110670

SEQ ID NO: 879 - DNA, 32 bp, synthetic construct; identical to SEQ ID NO: 127
  source 1..32: mol_type = other DNA
  misc_feature 28..29: note = DNA
  misc_feature order(1..27,30..32): note = RNA
  modified_base 27: mod_base = OTHER; note = 2-Prime-O-Methoxyethyl modified nucleoside
  modified_base 28: mod_base = OTHER; note = DNA nucleotide carrying a 6-amino-5-nitro-3-yl-2(1H)-pyridone nucleobase
  modified_base order(22,26,31): mod_base = OTHER; note = 2-Prime-Fluoro modified nucleoside
  modified_base order(1..21,23..25,30,32): mod_base = OTHER; note = 2-Prime-O-Methyl modified nucleoside
  modified_base order(1^2,31^32): mod_base = OTHER; note = (1,3-dimethylimidazolidin-2-ylidene) Phosphoramidate linkage
  modified_base order(2..29,30^31): mod_base = OTHER; note = Phosphorothioate linkage
  modified_base 29^30: mod_base = OTHER; note = Methylphosphonate linkage
  misc_feature 1..32: note = RM110671

SEQ ID NO: 880 - DNA, 32 bp, synthetic construct; identical to SEQ ID NO: 128
  source 1..32: mol_type = other DNA
  misc_feature 25..26: note = DNA
  misc_feature order(1..24,27..32): note = RNA
  modified_base 24: mod_base = OTHER; note = 2-Prime-O-Methoxyethyl modified nucleoside
  modified_base 25: mod_base = OTHER; note = DNA nucleotide carrying a 6-amino-5-nitro-3-yl-2(1H)-pyridone nucleobase
  modified_base order(19,23,28): mod_base = OTHER; note = 2-Prime-Fluoro modified nucleoside
  modified_base order(1..18,20..22,27,29..32): mod_base = OTHER; note = 2-Prime-O-Methyl modified nucleoside
  modified_base order(1^2,31^32): mod_base = OTHER; note = (1,3-dimethylimidazolidin-2-ylidene) Phosphoramidate linkage
  modified_base order(2..26,27..31): mod_base = OTHER; note = Phosphorothioate linkage
  modified_base 26^27: mod_base = OTHER; note = Methylphosphonate linkage
  misc_feature 1..32: note = RM110672

SEQ ID NO: 881 - DNA, 32 bp, synthetic construct; identical to SEQ ID NO: 129
  source 1..32: mol_type = other DNA
  misc_feature 22..23: note = DNA
  misc_feature order(1..21,24..32): note = RNA
  modified_base 21: mod_base = OTHER; note = 2-Prime-O-Methoxyethyl modified nucleoside
  modified_base 22: mod_base = OTHER; note = DNA nucleotide carrying a 6-amino-5-nitro-3-yl-2(1H)-pyridone nucleobase
  modified_base order(16,20,25): mod_base = OTHER; note = 2-Prime-Fluoro modified nucleoside
  modified_base order(1..15,17..19,24,26..32): mod_base = OTHER; note = 2-Prime-O-Methyl modified nucleoside
  modified_base order(1^2,31^32): mod_base = OTHER; note = (1,3-dimethylimidazolidin-2-ylidene) Phosphoramidate linkage
  modified_base order(2..23,24..31): mod_base = OTHER; note = Phosphorothioate linkage
  modified_base 23^24: mod_base = OTHER; note = Methylphosphonate linkage
  misc_feature 1..32: note = RM110673

SEQ ID NO: 882 - DNA, 32 bp, synthetic construct; identical to SEQ ID NO: 19
  source 1..32: mol_type = other DNA
  misc_feature 19..20: note = DNA
  misc_feature order(1..18,21..32): note = RNA
  modified_base 18: mod_base = OTHER; note = 2-Prime-O-Methoxyethyl modified nucleoside
  modified_base 19: mod_base = OTHER; note = DNA nucleotide carrying a 6-amino-5-nitro-3-yl-2(1H)-pyridone nucleobase
  modified_base order(13,17,22): mod_base = OTHER; note = 2-Prime-Fluoro modified nucleoside
  modified_base order(1..12,14..16,21,23..32): mod_base = OTHER; note = 2-Prime-O-Methyl modified nucleoside
  modified_base order(1^2,31^32): mod_base = OTHER; note = (1,3-dimethylimidazolidin-2-ylidene) Phosphoramidate linkage
  modified_base order(2..20,21..31): mod_base = OTHER; note = Phosphorothioate linkage
  modified_base 20^21: mod_base = OTHER; note = Methylphosphonate linkage
  misc_feature 1..32: note = RM110674

SEQ ID NO: 883 - DNA, 32 bp, synthetic construct; identical to SEQ ID NO: 131
  source 1..32: mol_type = other DNA
  misc_feature 16..17: note = DNA
  misc_feature order(1..15,18..32): note = RNA
  modified_base 15: mod_base = OTHER; note = 2-Prime-O-Methoxyethyl modified nucleoside
  modified_base 16: mod_base = OTHER; note = DNA nucleotide carrying a 6-amino-5-nitro-3-yl-2(1H)-pyridone nucleobase
  modified_base order(10,14,19): mod_base = OTHER; note = 2-Prime-Fluoro modified nucleoside
  modified_base order(1..9,11..13,18,20..32): mod_base = OTHER; note = 2-Prime-O-Methyl modified nucleoside
  modified_base order(1^2,31^32): mod_base = OTHER; note = (1,3-dimethylimidazolidin-2-ylidene) Phosphoramidate linkage
  modified_base order(2..17,18..31): mod_base = OTHER; note = Phosphorothioate linkage
  modified_base 17^18: mod_base = OTHER; note = Methylphosphonate linkage
  misc_feature 1..32: note = RM110675

SEQ ID NO: 884 - DNA, 32 bp, synthetic construct; identical to SEQ ID NO: 132
  source 1..32: mol_type = other DNA
  misc_feature 13..14: note = DNA
  misc_feature order(1..12,15..32): note = RNA
  modified_base 12: mod_base = OTHER; note = 2-Prime-O-Methoxyethyl modified nucleoside
  modified_base 13: mod_base = OTHER; note = DNA nucleotide carrying a 6-amino-5-nitro-3-yl-2(1H)-pyridone nucleobase
  modified_base order(7,11,16): mod_base = OTHER; note = 2-Prime-Fluoro modified nucleoside
  modified_base order(1..6,8..10,15,17..32): mod_base = OTHER; note = 2-Prime-O-Methyl modified nucleoside
  modified_base order(1^2,31^32): mod_base = OTHER; note = (1,3-dimethylimidazolidin-2-ylidene) Phosphoramidate linkage
  modified_base order(2..14,15..31): mod_base = OTHER; note = Phosphorothioate linkage
  modified_base 14^15: mod_base = OTHER; note = Methylphosphonate linkage
  misc_feature 1..32: note = RM110676

SEQ ID NO: 885 - DNA, 32 bp, synthetic construct; identical to SEQ ID NO: 133
  source 1..32: mol_type = other DNA
  misc_feature 10..11: note = DNA
  misc_feature order(1..9,12..32): note = RNA
  modified_base 9: mod_base = OTHER; note = 2-Prime-O-Methoxyethyl modified nucleoside
  modified_base 10: mod_base = OTHER; note = DNA nucleotide carrying a 6-amino-5-nitro-3-yl-2(1H)-pyridone nucleobase
  modified_base order(4,8,13): mod_base = OTHER; note = 2-Prime-Fluoro modified nucleoside
  modified_base order(1..3,5..7,12,14..32): mod_base = OTHER; note = 2-Prime-O-Methyl modified nucleoside
  modified_base order(1^2,31^32): mod_base = OTHER; note = (1,3-dimethylimidazolidin-2-ylidene) Phosphoramidate linkage
  modified_base order(2..11,12..31): mod_base = OTHER; note = Phosphorothioate linkage
  modified_base 11^12: mod_base = OTHER; note = Methylphosphonate linkage
  misc_feature 1..32: note = RM110677

SEQ ID NO: 886 - DNA, 32 bp, synthetic construct; identical to SEQ ID NO: 134
  source 1..32: mol_type = other DNA
  misc_feature 7..8: note = DNA
  misc_feature order(1..6,9..32): note = RNA
  modified_base 6: mod_base = OTHER; note = 2-Prime-O-Methoxyethyl modified nucleoside
  modified_base 7: mod_base = OTHER; note = DNA nucleotide carrying a 6-amino-5-nitro-3-yl-2(1H)-pyridone nucleobase
  modified_base order(1,5,10): mod_base = OTHER; note = 2-Prime-Fluoro modified nucleoside
  modified_base order(2..4,9,11..32): mod_base = OTHER; note = 2-Prime-O-Methyl modified nucleoside
  modified_base order(1^2,31^32): mod_base = OTHER; note = (1,3-dimethylimidazolidin-2-ylidene) Phosphoramidate linkage
  modified_base order(2..8,9..31): mod_base = OTHER; note = Phosphorothioate linkage
  modified_base 8^9: mod_base = OTHER; note = Methylphosphonate linkage
  misc_feature 1..32: note = RM110678

SEQ ID NO: 887 - DNA, 26 bp, synthetic construct
  source 1..26: mol_type = other DNA
  misc_feature 22..23: note = DNA
  misc_feature order(1..21,24..26): note = RNA
  modified_base 21: mod_base = OTHER; note = 2-Prime-O-Methoxyethyl modified nucleoside
  modified_base 22: mod_base = OTHER; note = DNA nucleotide carrying a 6-amino-5-nitro-3-yl-2(1H)-pyridone nucleobase
  modified_base order(5,7..9,11,25..26): mod_base = OTHER; note = 2-Prime-Fluoro modified nucleoside
  modified_base order(1..4,6,10,12..20,24): mod_base = OTHER; note = 2-Prime-O-Methyl modified nucleoside
  modified_base order(1^2,25^26): mod_base = OTHER; note = (1,3-dimethylimidazolidin-2-ylidene) Phosphoramidate linkage
  modified_base order(2..23,24^25): mod_base = OTHER; note = Phosphorothioate linkage
  modified_base 23^24: mod_base = OTHER; note = Methylphosphonate linkage
  misc_feature 1..26: note = RM110679
attcggtcaaacctctgaggantggg

SEQ ID NO: 888 - DNA, 26 bp, synthetic construct
  source 1..26: mol_type = other DNA
  misc_feature 19..20: note = DNA
  misc_feature order(1..18,21..26): note = RNA
  modified_base 18: mod_base = OTHER; note = 2-Prime-O-Methoxyethyl modified nucleoside
  modified_base 19: mod_base = OTHER; note = DNA nucleotide carrying a 6-amino-5-nitro-3-yl-2(1H)-pyridone nucleobase
  modified_base order(2,4..6,8,22..23): mod_base = OTHER; note = 2-Prime-Fluoro modified nucleoside
  modified_base order(1,3,7,9..17,21,24..26): mod_base = OTHER; note = 2-Prime-O-Methyl modified nucleoside
  modified_base order(1^2,25^26): mod_base = OTHER; note = (1,3-dimethylimidazolidin-2-ylidene) Phosphoramidate linkage
  modified_base order(2..20,21..25): mod_base = OTHER; note = Phosphorothioate linkage
  modified_base 20^21: mod_base = OTHER; note = Methylphosphonate linkage
  misc_feature 1..26: note = RM110680
cggtcaaacctctgaggantgggttc

SEQ ID NO: 889 - DNA, 26 bp, synthetic construct
  source 1..26: mol_type = other DNA
  misc_feature 7..8: note = DNA
  misc_feature order(1..6,9..26): note = RNA
  modified_base 6: mod_base = OTHER; note = 2-Prime-O-Methoxyethyl modified nucleoside
  modified_base 7: mod_base = OTHER; note = DNA nucleotide carrying a 6-amino-5-nitro-3-yl-2(1H)-pyridone nucleobase
  modified_base order(5,10,20,22..24,26): mod_base = OTHER; note = 2-Prime-Fluoro modified nucleoside
  modified_base order(1..4,9,11..19,21,25): mod_base = OTHER; note = 2-Prime-O-Methyl modified nucleoside
  modified_base order(1^2,25^26): mod_base = OTHER; note = (1,3-dimethylimidazolidin-2-ylidene) Phosphoramidate linkage
  modified_base order(2..8,9..25): mod_base = OTHER; note = Phosphorothioate linkage
  modified_base 8^9: mod_base = OTHER; note = Methylphosphonate linkage
  misc_feature 1..26: note = RM110681
tgaggantgggttcatttttcttgtc

SEQ ID NO: 890 - DNA, 26 bp, synthetic construct
  source 1..26: mol_type = other DNA
  misc_feature 22..23: note = DNA
  misc_feature order(1..21,24..26): note = RNA
  modified_base 21: mod_base = OTHER; note = 2-Prime-O-Methoxyethyl modified nucleoside
  modified_base 22: mod_base = OTHER; note = DNA nucleotide carrying a 6-amino-5-nitro-3-yl-2(1H)-pyridone nucleobase
  modified_base order(7..9,11,25): mod_base = OTHER; note = 2-Prime-Fluoro modified nucleoside
  modified_base order(1..6,10,12..20,24,26): mod_base = OTHER; note = 2-Prime-O-Methyl modified nucleoside
  modified_base order(1^2,25^26): mod_base = OTHER; note = (1,3-dimethylimidazolidin-2-ylidene) Phosphoramidate linkage
  modified_base order(2..23,24^25): mod_base = OTHER; note = Phosphorothioate linkage
  modified_base 23^24: mod_base = OTHER; note = Methylphosphonate linkage
  misc_feature 1..26: note = RM110682
attcggtcaaacctctgaggantggg

SEQ ID NO: 891 - DNA, 26 bp, synthetic construct
  source 1..26: mol_type = other DNA
  misc_feature 19..20: note = DNA
  misc_feature order(1..18,21..26): note = RNA
  modified_base 18: mod_base = OTHER; note = 2-Prime-O-Methoxyethyl modified nucleoside
  modified_base 19: mod_base = OTHER; note = DNA nucleotide carrying a 6-amino-5-nitro-3-yl-2(1H)-pyridone nucleobase
  modified_base order(4..6,8,22): mod_base = OTHER; note = 2-Prime-Fluoro modified nucleoside
  modified_base order(1..3,7,9..17,21,23..26): mod_base = OTHER; note = 2-Prime-O-Methyl modified nucleoside
  modified_base order(1^2,25^26): mod_base = OTHER; note = (1,3-dimethylimidazolidin-2-ylidene) Phosphoramidate linkage
  modified_base order(2..20,21..25): mod_base = OTHER; note = Phosphorothioate linkage
  modified_base 20^21: mod_base = OTHER; note = Methylphosphonate linkage
  misc_feature 1..26: note = RM110683
cggtcaaacctctgaggantgggttc

SEQ ID NO: 892 - DNA, 26 bp, synthetic construct
  source 1..26: mol_type = other DNA
  misc_feature 16..17: note = DNA
  misc_feature order(1..15,18..26): note = RNA
  modified_base 15: mod_base = OTHER; note = 2-Prime-O-Methoxyethyl modified nucleoside
  modified_base 16: mod_base = OTHER; note = DNA nucleotide carrying a 6-amino-5-nitro-3-yl-2(1H)-pyridone nucleobase
  modified_base order(1..3,5,19): mod_base = OTHER; note = 2-Prime-Fluoro modified nucleoside
  modified_base order(4,6..14,18,20..26): mod_base = OTHER; note = 2-Prime-O-Methyl modified nucleoside
  modified_base order(1^2,25^26): mod_base = OTHER; note = (1,3-dimethylimidazolidin-2-ylidene) Phosphoramidate linkage
  modified_base order(2..17,18..25): mod_base = OTHER; note = Phosphorothioate linkage
  modified_base 17^18: mod_base = OTHER; note = Methylphosphonate linkage
  misc_feature 1..26: note = RM110684
tcaaacctctgaggantgggttcatt

SEQ ID NO: 893 - DNA, 29 bp, synthetic construct
  source 1..29: mol_type = other DNA
  misc_feature 24..25: note = DNA
  misc_feature order(1..23,26..29): note = RNA
  modified_base 23: mod_base = OTHER; note = 2-Prime-O-Methoxyethyl modified nucleoside
  modified_base 24: mod_base = OTHER; note = DNA nucleotide carrying a 6-amino-5-nitro-3-yl-2(1H)-pyridone nucleobase
  modified_base order(9..11,13,27): mod_base = OTHER; note = 2-Prime-Fluoro modified nucleoside
  modified_base order(1..8,12,14..22,26,28..29): mod_base = OTHER; note = 2-Prime-O-Methyl modified nucleoside
  modified_base order(1^2,28^29): mod_base = OTHER; note = (1,3-dimethylimidazolidin-2-ylidene) Phosphoramidate linkage
  modified_base order(2..25,26..28): mod_base = OTHER; note = Phosphorothioate linkage
  modified_base 25^26: mod_base = OTHER; note = Methylphosphonate linkage
  misc_feature 1..29: note = RM110685
caattcggtcaaacctctgaggantgggt

SEQ ID NO: 894 - DNA, 29 bp, synthetic construct
  source 1..29: mol_type = other DNA
  misc_feature 21..22: note = DNA
  misc_feature order(1..20,23..29): note = RNA
  modified_base 20: mod_base = OTHER; note = 2-Prime-O-Methoxyethyl modified nucleoside
  modified_base 21: mod_base = OTHER; note = DNA nucleotide carrying a 6-amino-5-nitro-3-yl-2(1H)-pyridone nucleobase
  modified_base order(6..8,10,24): mod_base = OTHER; note = 2-Prime-Fluoro modified nucleoside
  modified_base order(1..5,9,11..19,23,25..29): mod_base = OTHER; note = 2-Prime-O-Methyl modified nucleoside
  modified_base order(1^2,28^29): mod_base = OTHER; note = (1,3-dimethylimidazolidin-2-ylidene) Phosphoramidate linkage
  modified_base order(2..22,23..28): mod_base = OTHER; note = Phosphorothioate linkage
  modified_base 22^23: mod_base = OTHER; note = Methylphosphonate linkage
  misc_feature 1..29: note = RM110686
ttcggtcaaacctctgaggantgggttca

SEQ ID NO: 895 - DNA, 29 bp, synthetic construct
  source 1..29: mol_type = other DNA
  misc_feature 18..19: note = DNA
  misc_feature order(1..17,20..29): note = RNA
  modified_base 17: mod_base = OTHER; note = 2-Prime-O-Methoxyethyl modified nucleoside
  modified_base 18: mod_base = OTHER; note = DNA nucleotide carrying a 6-amino-5-nitro-3-yl-2(1H)-pyridone nucleobase
  modified_base order(3..5,7,21): mod_base = OTHER; note = 2-Prime-Fluoro modified nucleoside
  modified_base order(1..2,6,8..16,20,22..29): mod_base = OTHER; note = 2-Prime-O-Methyl modified nucleoside
  modified_base order(1^2,28^29): mod_base = OTHER; note = (1,3-dimethylimidazolidin-2-ylidene) Phosphoramidate linkage
  modified_base order(2..19,20..28): mod_base = OTHER; note = Phosphorothioate linkage
  modified_base 19^20: mod_base = OTHER; note = Methylphosphonate linkage
  misc_feature 1..29: note = RM110687
ggtcaaacctctgaggantgggttcattt

SEQ ID NO: 896 - DNA, 23 bp, synthetic construct
  source 1..23: mol_type = other DNA
  misc_feature 18..19: note = DNA
  misc_feature order(1..17,20..23): note = RNA
  modified_base 17: mod_base = OTHER; note = 2-Prime-O-Methoxyethyl modified nucleoside
  modified_base 18: mod_base = OTHER; note = DNA nucleotide carrying a 6-amino-5-nitro-3-yl-2(1H)-pyridone nucleobase
  modified_base order(7,21): mod_base = OTHER; note = 2-Prime-Fluoro modified nucleoside
  modified_base order(1..6,8..16,20,22..23): mod_base = OTHER; note = 2-Prime-O-Methyl modified nucleoside
  modified_base order(1^2,22^23): mod_base = OTHER; note = (1,3-dimethylimidazolidin-2-ylidene) Phosphoramidate linkage
  modified_base order(2..19,20..22): mod_base = OTHER; note = Phosphorothioate linkage
  modified_base 19^20: mod_base = OTHER; note = Methylphosphonate linkage
  misc_feature 1..23: note = RM110688
ggtcaaacctctgaggantgggt

SEQ ID NO: 897 - DNA, 23 bp, synthetic construct
  source 1..23: mol_type = other DNA
  misc_feature 15..16: note = DNA
  misc_feature order(1..14,17..23): note = RNA
  modified_base 14: mod_base = OTHER; note = 2-Prime-O-Methoxyethyl modified nucleoside
  modified_base 15: mod_base = OTHER; note = DNA nucleotide carrying a 6-amino-5-nitro-3-yl-2(1H)-pyridone nucleobase
  modified_base order(4,18): mod_base = OTHER; note = 2-Prime-Fluoro modified nucleoside
  modified_base order(1..3,5..13,17,19..23): mod_base = OTHER; note = 2-Prime-O-Methyl modified nucleoside
  modified_base order(1^2,22^23): mod_base = OTHER; note = (1,3-dimethylimidazolidin-2-ylidene) Phosphoramidate linkage
  modified_base order(2..16,17..22): mod_base = OTHER; note = Phosphorothioate linkage
  modified_base 16^17: mod_base = OTHER; note = Methylphosphonate linkage
  misc_feature 1..23: note = RM110689
caaacctctgaggantgggttca

SEQ ID NO: 898 - DNA, 23 bp, synthetic construct
  source 1..23: mol_type = other DNA
  misc_feature 12..13: note = DNA
  misc_feature order(1..11,14..23): note = RNA
  modified_base 11: mod_base = OTHER; note = 2-Prime-O-Methoxyethyl modified nucleoside
  modified_base 12: mod_base = OTHER; note = DNA nucleotide carrying a 6-amino-5-nitro-3-yl-2(1H)-pyridone nucleobase
  modified_base order(1,15): mod_base = OTHER; note = 2-Prime-Fluoro modified nucleoside
  modified_base order(2..10,14,16..23): mod_base = OTHER; note = 2-Prime-O-Methyl modified nucleoside
  modified_base order(1^2,22^23): mod_base = OTHER; note = (1,3-dimethylimidazolidin-2-ylidene) Phosphoramidate linkage
  modified_base order(2..13,14..22): mod_base = OTHER; note = Phosphorothioate linkage
  modified_base 13^14: mod_base = OTHER; note = Methylphosphonate linkage
  misc_feature 1..23: note = RM110690
acctctgaggantgggttcattt

SEQ ID NO: 899 - DNA, 26 bp, synthetic construct
  source 1..26: mol_type = other DNA
  misc_feature 22..23: note = DNA
  misc_feature order(1..21,24..26): note = RNA
  modified_base 21: mod_base = OTHER; note = 2-Prime-O-Methoxyethyl modified nucleoside
  modified_base 22: mod_base = OTHER; note = DNA nucleotide carrying a 6-amino-5-nitro-3-yl-2(1H)-pyridone nucleobase
  modified_base order(11,25): mod_base = OTHER; note = 2-Prime-Fluoro modified nucleoside
  modified_base order(1..10,12..20,24,26): mod_base = OTHER; note = 2-Prime-O-Methyl modified nucleoside
  modified_base order(1^2,25^26): mod_base = OTHER; note = (1,3-dimethylimidazolidin-2-ylidene) Phosphoramidate linkage
  modified_base order(2..23,24^25): mod_base = OTHER; note = Phosphorothioate linkage
  modified_base 23^24: mod_base = OTHER; note = Methylphosphonate linkage
  misc_feature 1..26: note = RM110691
attcggtcaaacctctgaggantggg

SEQ ID NO: 900 - DNA, 26 bp, synthetic construct
  source 1..26: mol_type = other DNA
  misc_feature 19..20: note = DNA
  misc_feature order(1..18,21..26): note = RNA
  modified_base 18: mod_base = OTHER; note = 2-Prime-O-Methoxyethyl modified nucleoside
  modified_base 19: mod_base = OTHER; note = DNA nucleotide carrying a 6-amino-5-nitro-3-yl-2(1H)-pyridone nucleobase
  modified_base order(8,22): mod_base = OTHER; note = 2-Prime-Fluoro modified nucleoside
  modified_base order(1..7,9..17,21,23..26): mod_base = OTHER; note = 2-Prime-O-Methyl modified nucleoside
  modified_base order(1^2,25^26): mod_base = OTHER; note = (1,3-dimethylimidazolidin-2-ylidene) Phosphoramidate linkage
  modified_base order(2..20,21..25): mod_base = OTHER; note = Phosphorothioate linkage
  modified_base 20^21: mod_base = OTHER; note = Methylphosphonate linkage
  misc_feature 1..26: note = RM110692
cggtcaaacctctgaggantgggttc

SEQ ID NO: 901 - DNA, 26 bp, synthetic construct
  source 1..26: mol_type = other DNA
  misc_feature 16..17: note = DNA
  misc_feature order(1..15,18..26): note = RNA
  modified_base 15: mod_base = OTHER; note = 2-Prime-O-Methoxyethyl modified nucleoside
  modified_base 16: mod_base = OTHER; note = DNA nucleotide carrying a 6-amino-5-nitro-3-yl-2(1H)-pyridone nucleobase
  modified_base order(5,19): mod_base = OTHER; note = 2-Prime-Fluoro modified nucleoside
  modified_base order(1..4,6..14,18,20..26): mod_base = OTHER; note = 2-Prime-O-Methyl modified nucleoside
  modified_base order(1^2,25^26): mod_base = OTHER; note = (1,3-dimethylimidazolidin-2-ylidene) Phosphoramidate linkage
  modified_base order(2..17,18..25): mod_base = OTHER; note = Phosphorothioate linkage
  modified_base 17^18: mod_base = OTHER; note = Methylphosphonate linkage
  misc_feature 1..26: note = RM110693
tcaaacctctgaggantgggttcatt

SEQ ID NO: 902 - DNA, 26 bp, synthetic construct
  source 1..26: mol_type = other DNA
  misc_feature 13..14: note = DNA
  misc_feature order(1..12,15..26): note = RNA
  modified_base 12: mod_base = OTHER; note = 2-Prime-O-Methoxyethyl modified nucleoside
  modified_base 13: mod_base = OTHER; note = DNA nucleotide carrying a 6-amino-5-nitro-3-yl-2(1H)-pyridone nucleobase
  modified_base order(2,16): mod_base = OTHER; note = 2-Prime-Fluoro modified nucleoside
  modified_base order(1,3..11,15,17..26): mod_base = OTHER; note = 2-Prime-O-Methyl modified nucleoside
  modified_base order(1^2,25^26): mod_base = OTHER; note = (1,3-dimethylimidazolidin-2-ylidene) Phosphoramidate linkage
  modified_base order(2..14,15..25): mod_base = OTHER; note = Phosphorothioate linkage
  modified_base 14^15: mod_base = OTHER; note = Methylphosphonate linkage
  misc_feature 1..26: note = RM110694
aacctctgaggantgggttcattttt

SEQ ID NO: 903 - DNA, 29 bp, synthetic construct
  source 1..29: mol_type = other DNA
  misc_feature 24..25: note = DNA
  misc_feature order(1..23,26..29): note = RNA
  modified_base 23: mod_base = OTHER; note = 2-Prime-O-Methoxyethyl modified nucleoside
  modified_base 24: mod_base = OTHER; note = DNA nucleotide carrying a 6-amino-5-nitro-3-yl-2(1H)-pyridone nucleobase
  modified_base order(13,27): mod_base = OTHER; note = 2-Prime-Fluoro modified nucleoside
  modified_base order(1..12,14..22,26,28..29): mod_base = OTHER; note = 2-Prime-O-Methyl modified nucleoside
  modified_base order(1^2,28^29): mod_base = OTHER; note = (1,3-dimethylimidazolidin-2-ylidene) Phosphoramidate linkage
  modified_base order(2..25,26..28): mod_base = OTHER; note = Phosphorothioate linkage
  modified_base 25^26: mod_base = OTHER; note = Methylphosphonate linkage
  misc_feature 1..29: note = RM110695
caattcggtcaaacctctgaggantgggt

SEQ ID NO: 904 - DNA, 29 bp, synthetic construct
  source 1..29: mol_type = other DNA
  misc_feature 21..22: note = DNA
  misc_feature order(1..20,23..29): note = RNA
  modified_base 20: mod_base = OTHER; note = 2-Prime-O-Methoxyethyl modified nucleoside
  modified_base 21: mod_base = OTHER; note = DNA nucleotide carrying a 6-amino-5-nitro-3-yl-2(1H)-pyridone nucleobase
  modified_base order(10,24): mod_base = OTHER; note = 2-Prime-Fluoro modified nucleoside
  modified_base order(1..9,11..19,23,25..29): mod_base = OTHER; note = 2-Prime-O-Methyl modified nucleoside
  modified_base order(1^2,28^29): mod_base = OTHER; note = (1,3-dimethylimidazolidin-2-ylidene) Phosphoramidate linkage
  modified_base order(2..22,23..28): mod_base = OTHER; note = Phosphorothioate linkage
  modified_base 22^23: mod_base = OTHER; note = Methylphosphonate linkage
  misc_feature 1..29: note = RM110696
ttcggtcaaacctctgaggantgggttca

SEQ ID NO: 905 - DNA, 29 bp, synthetic construct
  source 1..29: mol_type = other DNA
  misc_feature 18..19: note = DNA
  misc_feature order(1..17,20..29): note = RNA
  modified_base 17: mod_base = OTHER; note = 2-Prime-O-Methoxyethyl modified nucleoside
  modified_base 18: mod_base = OTHER; note = DNA nucleotide carrying a 6-amino-5-nitro-3-yl-2(1H)-pyridone nucleobase
  modified_base order(7,21): mod_base = OTHER; note = 2-Prime-Fluoro modified nucleoside
  modified_base order(1..6,8..16,20,22..29): mod_base = OTHER; note = 2-Prime-O-Methyl modified nucleoside
  modified_base order(1^2,28^29): mod_base = OTHER; note = (1,3-dimethylimidazolidin-2-ylidene) Phosphoramidate linkage
  modified_base order(2..19,20..28): mod_base = OTHER; note = Phosphorothioate linkage
  modified_base 19^20: mod_base = OTHER; note = Methylphosphonate linkage
  misc_feature 1..29: note = RM110697
ggtcaaacctctgaggantgggttcattt

SEQ ID NO: 906 - DNA, 29 bp, synthetic construct
  source 1..29: mol_type = other DNA
  misc_feature 15..16: note = DNA
  misc_feature order(1..14,17..29): note = RNA
  modified_base 14: mod_base = OTHER; note = 2-Prime-O-Methoxyethyl modified nucleoside
  modified_base 15: mod_base = OTHER; note = DNA nucleotide carrying a 6-amino-5-nitro-3-yl-2(1H)-pyridone nucleobase
  modified_base order(4,18): mod_base = OTHER; note = 2-Prime-Fluoro modified nucleoside
  modified_base order(1..3,5..13,17,19..29): mod_base = OTHER; note = 2-Prime-O-Methyl modified nucleoside
  modified_base order(1^2,28^29): mod_base = OTHER; note = (1,3-dimethylimidazolidin-2-ylidene) Phosphoramidate linkage
  modified_base order(2..16,17..28): mod_base = OTHER; note = Phosphorothioate linkage
  modified_base 16^17: mod_base = OTHER; note = Methylphosphonate linkage
  misc_feature 1..29: note = RM110698
caaacctctgaggantgggttcatttttc

SEQ ID NO: 907 - DNA, 29 bp, synthetic construct
  source 1..29: mol_type = other DNA
  misc_feature 12..13: note = DNA
  misc_feature order(1..11,14..29): note = RNA
  modified_base 11: mod_base = OTHER; note = 2-Prime-O-Methoxyethyl modified nucleoside
  modified_base 12: mod_base = OTHER; note = DNA nucleotide carrying a 6-amino-5-nitro-3-yl-2(1H)-pyridone nucleobase
  modified_base order(1,15): mod_base = OTHER; note = 2-Prime-Fluoro modified nucleoside
  modified_base order(2..10,14,16..29): mod_base = OTHER; note = 2-Prime-O-Methyl modified nucleoside
  modified_base order(1^2,28^29): mod_base = OTHER; note = (1,3-dimethylimidazolidin-2-ylidene) Phosphoramidate linkage
  modified_base order(2..13,14..28): mod_base = OTHER; note = Phosphorothioate linkage
  modified_base 13^14: mod_base = OTHER; note = Methylphosphonate linkage
  misc_feature 1..29: note = RM110699
acctctgaggantgggttcatttttcttg

SEQ ID NO: 908 - DNA, 32 bp, synthetic construct; identical to SEQ ID NO: 131
  source 1..32: mol_type = other DNA
  misc_feature 15..17: note = DNA
  misc_feature order(1..14,18..32): note = RNA
  modified_base 16: mod_base = OTHER; note = DNA nucleotide carrying a 6-amino-5-nitro-3-yl-2(1H)-pyridone nucleobase
  modified_base order(2,5..6,13,19..22,31): mod_base = OTHER; note = 2-Prime-Fluoro modified nucleoside
  modified_base order(1,3..4,7..12,14,18,23..30,32): mod_base = OTHER; note = 2-Prime-O-Methyl modified nucleoside
  modified_base order(1^2,17^18,31^32): mod_base = OTHER; note = (1,3-dimethylimidazolidin-2-ylidene) Phosphoramidate linkage
  modified_base order(2..17,18..31): mod_base = OTHER; note = Phosphorothioate linkage
  misc_feature 1..32: note = RM110700

SEQ ID NO: 909 - DNA, 32 bp, synthetic construct; identical to SEQ ID NO: 131
  source 1..32: mol_type = other DNA
  misc_feature 15..17: note = DNA
  misc_feature order(1..14,18..32): note = RNA
  modified_base 16: mod_base = OTHER; note = DNA nucleotide carrying a 6-amino-5-nitro-3-yl-2(1H)-pyridone nucleobase
  modified_base order(3,12..14,19,21,28..29,32): mod_base = OTHER; note = 2-Prime-Fluoro modified nucleoside
  modified_base order(1..2,4..11,18,20,22..27,30..31): mod_base = OTHER; note = 2-Prime-O-Methyl modified nucleoside
  modified_base order(1^2,17^18,31^32): mod_base = OTHER; note = (1,3-dimethylimidazolidin-2-ylidene) Phosphoramidate linkage
  modified_base order(2..17,18..31): mod_base = OTHER; note = Phosphorothioate linkage
  misc_feature 1..32: note = RM110701

SEQ ID NO: 910 - DNA, 23 bp, synthetic construct
  source 1..23: mol_type = other DNA
  misc_feature 17..19: note = DNA
  misc_feature order(1..16,20..23): note = RNA
  modified_base 18: mod_base = OTHER; note = DNA nucleotide carrying a 6-amino-5-nitro-3-yl-2(1H)-pyridone nucleobase
  modified_base order(7..8,15,21..23): mod_base = OTHER; note = 2-Prime-Fluoro modified nucleoside
  modified_base order(1..6,9..14,16,20): mod_base = OTHER; note = 2-Prime-O-Methyl modified nucleoside
  modified_base order(1^2,19^20,22^23): mod_base = OTHER; note = (1,3-dimethylimidazolidin-2-ylidene) Phosphoramidate linkage
  modified_base order(2..19,20..22): mod_base = OTHER; note = Phosphorothioate linkage
  misc_feature 1..23: note = RM110702
ggtcaaacctctgaggantgggt

SEQ ID NO: 911 - DNA, 23 bp, synthetic construct
  source 1..23: mol_type = other DNA
  misc_feature 14..16: note = DNA
  misc_feature order(1..13,17..23): note = RNA
  modified_base 15: mod_base = OTHER; note = DNA nucleotide carrying a 6-amino-5-nitro-3-yl-2(1H)-pyridone nucleobase
  modified_base order(4..5,12,18..20): mod_base = OTHER; note = 2-Prime-Fluoro modified nucleoside
  modified_base order(1..3,6..11,13,17,21..23): mod_base = OTHER; note = 2-Prime-O-Methyl modified nucleoside
  modified_base order(1^2,16^17,22^23): mod_base = OTHER; note = (1,3-dimethylimidazolidin-2-ylidene) Phosphoramidate linkage
  modified_base order(2..16,17..22): mod_base = OTHER; note = Phosphorothioate linkage
  misc_feature 1..23: note = RM110703
caaacctctgaggantgggttca

SEQ ID NO: 912 - DNA, 23 bp, synthetic construct
  source 1..23: mol_type = other DNA
  misc_feature 11..13: note = DNA
  misc_feature order(1..10,14..23): note = RNA
  modified_base 12: mod_base = OTHER; note = DNA nucleotide carrying a 6-amino-5-nitro-3-yl-2(1H)-pyridone nucleobase
  modified_base order(1..2,9,15..17): mod_base = OTHER; note = 2-Prime-Fluoro modified nucleoside
  modified_base order(3..8,10,14,18..23): mod_base = OTHER; note = 2-Prime-O-Methyl modified nucleoside
  modified_base order(1^2,13^14,22^23): mod_base = OTHER; note = (1,3-dimethylimidazolidin-2-ylidene) Phosphoramidate linkage
  modified_base order(2..13,14..22): mod_base = OTHER; note = Phosphorothioate linkage
  misc_feature 1..23: note = RM110704
acctctgaggantgggttcattt

SEQ ID NO: 913 - DNA, 32 bp, synthetic construct; identical to SEQ ID NO: 128
  source 1..32: mol_type = other DNA
  misc_feature 24..26: note = DNA
  misc_feature order(1..23,27..32): note = RNA
  modified_base 25: mod_base = OTHER; note = DNA nucleotide carrying a 6-amino-5-nitro-3-yl-2(1H)-pyridone nucleobase
  modified_base order(14..15,22,28..30): mod_base = OTHER; note = 2-Prime-Fluoro modified nucleoside
  modified_base order(1..13,16..21,23,27,31..32): mod_base = OTHER; note = 2-Prime-O-Methyl modified nucleoside
  modified_base order(1^2,26^27,31^32): mod_base = OTHER; note = (1,3-dimethylimidazolidin-2-ylidene) Phosphoramidate linkage
  modified_base order(2..26,27..31): mod_base = OTHER; note = Phosphorothioate linkage
  misc_feature 1..32: note = RM110705

SEQ ID NO: 914 - DNA, 32 bp, synthetic construct; identical to SEQ ID NO: 129
  source 1..32: mol_type = other DNA
  misc_feature 21..23: note = DNA
  misc_feature order(1..20,24..32): note = RNA
  modified_base 22: mod_base = OTHER; note = DNA nucleotide carrying a 6-amino-5-nitro-3-yl-2(1H)-pyridone nucleobase
  modified_base order(11..12,19,25..27): mod_base = OTHER; note = 2-Prime-Fluoro modified nucleoside
  modified_base order(1..10,13..18,20,24,28..32): mod_base = OTHER; note = 2-Prime-O-Methyl modified nucleoside
  modified_base order(1^2,23^24,31^32): mod_base = OTHER; note = (1,3-dimethylimidazolidin-2-ylidene) Phosphoramidate linkage
  modified_base order(2..23,24..31): mod_base = OTHER; note = Phosphorothioate linkage
  misc_feature 1..32: note = RM110706

SEQ ID NO: 915 - DNA, 32 bp, synthetic construct; identical to SEQ ID NO: 19
  source 1..32: mol_type = other DNA
  misc_feature 18..20: note = DNA
  misc_feature order(1..17,21..32): note = RNA
  modified_base 19: mod_base = OTHER; note = DNA nucleotide carrying a 6-amino-5-nitro-3-yl-2(1H)-pyridone nucleobase
  modified_base order(8..9,16,22..24): mod_base = OTHER; note = 2-Prime-Fluoro modified nucleoside
  modified_base order(1..7,10..15,17,21,25..32): mod_base = OTHER; note = 2-Prime-O-Methyl modified nucleoside
  modified_base order(1^2,20^21,31^32): mod_base = OTHER; note = (1,3-dimethylimidazolidin-2-ylidene) Phosphoramidate linkage
  modified_base order(2..20,21..31): mod_base = OTHER; note = Phosphorothioate linkage
  misc_feature 1..32: note = RM110707

SEQ ID NO: 916 - DNA, 32 bp, synthetic construct; identical to SEQ ID NO: 131
  source 1..32: mol_type = other DNA
  misc_feature 15..17: note = DNA
  misc_feature order(1..14,18..32): note = RNA
  modified_base 16: mod_base = OTHER; note = DNA nucleotide carrying a 6-amino-5-nitro-3-yl-2(1H)-pyridone nucleobase
  modified_base order(5..6,13,19..21): mod_base = OTHER; note = 2-Prime-Fluoro modified nucleoside
  modified_base order(1..4,7..12,14,18,22..32): mod_base = OTHER; note = 2-Prime-O-Methyl modified nucleoside
  modified_base order(1^2,17^18,31^32): mod_base = OTHER; note = (1,3-dimethylimidazolidin-2-ylidene) Phosphoramidate linkage
  modified_base order(2..17,18..31): mod_base = OTHER; note = Phosphorothioate linkage
  misc_feature 1..32: note = RM110708

SEQ ID NO: 917 - DNA, 32 bp, synthetic construct; identical to SEQ ID NO: 132
  source 1..32: mol_type = other DNA
  misc_feature 12..14: note = DNA
  misc_feature order(1..11,15..32): note = RNA
  modified_base 13: mod_base = OTHER; note = DNA nucleotide carrying a 6-amino-5-nitro-3-yl-2(1H)-pyridone nucleobase
  modified_base order(2..3,10,16..18): mod_base = OTHER; note = 2-Prime-Fluoro modified nucleoside
  modified_base order(1,4..9,11,15,19..32): mod_base = OTHER; note = 2-Prime-O-Methyl modified nucleoside
  modified_base order(1^2,14^15,31^32): mod_base = OTHER; note = (1,3-dimethylimidazolidin-2-ylidene) Phosphoramidate linkage
  modified_base order(2..14,15..31): mod_base = OTHER; note = Phosphorothioate linkage
  misc_feature 1..32: note = RM110709

SEQ ID NO: 918 - DNA, 23 bp, synthetic construct
  source 1..23: mol_type = other DNA
  misc_feature 8..10: note = DNA
  misc_feature order(1..7,11..23): note = RNA
  modified_base 9: mod_base = OTHER; note = DNA nucleotide carrying a 6-amino-5-nitro-3-yl-2(1H)-pyridone nucleobase
  modified_base order(6..7,12,14,21..22): mod_base = OTHER; note = 2-Prime-Fluoro modified nucleoside
  modified_base order(1..5,11,13,15..20,23): mod_base = OTHER; note = 2-Prime-O-Methyl modified nucleoside
  modified_base order(1^2,10^11,22^23): mod_base = OTHER; note = (1,3-dimethylimidazolidin-2-ylidene) Phosphoramidate linkage
  modified_base order(2..10,11..22): mod_base = OTHER; note = Phosphorothioate linkage
  misc_feature 1..23: note = RM110710
tctgaggantgggttcatttttc

SEQ ID NO: 919 - DNA, 23 bp, synthetic construct
  source 1..23: mol_type = other DNA
  misc_feature 5..7: note = DNA
  misc_feature order(1..4,8..23): note = RNA
  modified_base 6: mod_base = OTHER; note = DNA nucleotide carrying a 6-amino-5-nitro-3-yl-2(1H)-pyridone nucleobase
  modified_base order(3..4,9,11,18..19): mod_base = OTHER; note = 2-Prime-Fluoro modified nucleoside
  modified_base order(1..2,8,10,12..17,20..23): mod_base = OTHER; note = 2-Prime-O-Methyl modified nucleoside
  modified_base order(1^2,7^8,22^23): mod_base = OTHER; note = (1,3-dimethylimidazolidin-2-ylidene) Phosphoramidate linkage
  modified_base order(2..7,8..22): mod_base = OTHER; note = Phosphorothioate linkage
  misc_feature 1..23: note = RM110711
gaggantgggttcatttttcttg

SEQ ID NO: 920 - DNA, 32 bp, synthetic construct; identical to SEQ ID NO: 19
  source 1..32: mol_type = other DNA
  misc_feature 18..20: note = DNA
  misc_feature order(1..17,21..32): note = RNA
  modified_base 19: mod_base = OTHER; note = DNA nucleotide carrying a 6-amino-5-nitro-3-yl-2(1H)-pyridone nucleobase
  modified_base order(16..17,22,24,31..32): mod_base = OTHER; note = 2-Prime-Fluoro modified nucleoside
  modified_base order(1..15,21,23,25..30): mod_base = OTHER; note = 2-Prime-O-Methyl modified nucleoside
  modified_base order(1^2,20^21,31^32): mod_base = OTHER; note = (1,3-dimethylimidazolidin-2-ylidene) Phosphoramidate linkage
  modified_base order(2..20,21..31): mod_base = OTHER; note = Phosphorothioate linkage
  misc_feature 1..32: note = RM110712

SEQ ID NO: 921 - DNA, 32 bp, synthetic construct; identical to SEQ ID NO: 131
  source 1..32: mol_type = other DNA
  misc_feature 15..17: note = DNA
  misc_feature order(1..14,18..32): note = RNA
  modified_base 16: mod_base = OTHER; note = DNA nucleotide carrying a 6-amino-5-nitro-3-yl-2(1H)-pyridone nucleobase
  modified_base order(13..14,19,21,28..29): mod_base = OTHER; note = 2-Prime-Fluoro modified nucleoside
  modified_base order(1..12,18,20,22..27,30..32): mod_base = OTHER; note = 2-Prime-O-Methyl modified nucleoside
  modified_base order(1^2,17^18,31^32): mod_base = OTHER; note = (1,3-dimethylimidazolidin-2-ylidene) Phosphoramidate linkage
  modified_base order(2..17,18..31): mod_base = OTHER; note = Phosphorothioate linkage
  misc_feature 1..32: note = RM110713

SEQ ID NO: 922 - DNA, 32 bp, synthetic construct; identical to SEQ ID NO: 132
  source 1..32: mol_type = other DNA
  misc_feature 12..14: note = DNA
  misc_feature order(1..11,15..32): note = RNA
  modified_base 13: mod_base = OTHER; note = DNA nucleotide carrying a 6-amino-5-nitro-3-yl-2(1H)-pyridone nucleobase
  modified_base order(10..11,16,18,25..26): mod_base = OTHER; note = 2-Prime-Fluoro modified nucleoside
  modified_base order(1..9,15,17,19..24,27..32): mod_base = OTHER; note = 2-Prime-O-Methyl modified nucleoside
  modified_base order(1^2,14^15,31^32): mod_base = OTHER; note = (1,3-dimethylimidazolidin-2-ylidene) Phosphoramidate linkage
  modified_base order(2..14,15..31): mod_base = OTHER; note = Phosphorothioate linkage
  misc_feature 1..32: note = RM110714

SEQ ID NO: 923 - DNA, 32 bp, synthetic construct; identical to SEQ ID NO: 133
  source 1..32: mol_type = other DNA
  misc_feature 9..11: note = DNA
  misc_feature order(1..8,12..32): note = RNA
  modified_base 10: mod_base = OTHER; note = DNA nucleotide carrying a 6-amino-5-nitro-3-yl-2(1H)-pyridone nucleobase
  modified_base order(7..8,13,15,22..23): mod_base = OTHER; note = 2-Prime-Fluoro modified nucleoside
  modified_base order(1..6,12,14,16..21,24..32): mod_base = OTHER; note = 2-Prime-O-Methyl modified nucleoside
  modified_base order(1^2,11^12,31^32): mod_base = OTHER; note = (1,3-dimethylimidazolidin-2-ylidene) Phosphoramidate linkage
  modified_base order(2..11,12..31): mod_base = OTHER; note = Phosphorothioate linkage
  misc_feature 1..32: note = RM110715

SEQ ID NO: 924 - DNA, 32 bp, synthetic construct; identical to SEQ ID NO: 134
  source 1..32: mol_type = other DNA
  misc_feature 6..8: note = DNA
  misc_feature order(1..5,9..32): note = RNA
  modified_base 7: mod_base = OTHER; note = DNA nucleotide carrying a 6-amino-5-nitro-3-yl-2(1H)-pyridone nucleobase
  modified_base order(4..5,10,12,19..20): mod_base = OTHER; note = 2-Prime-Fluoro modified nucleoside
  modified_base order(1..3,9,11,13..18,21..32): mod_base = OTHER; note = 2-Prime-O-Methyl modified nucleoside
  modified_base order(1^2,8^9,31^32): mod_base = OTHER; note = (1,3-dimethylimidazolidin-2-ylidene) Phosphoramidate linkage
  modified_base order(2..8,9..31): mod_base = OTHER; note = Phosphorothioate linkage
  misc_feature 1..32: note = RM110716

SEQ ID NO: 925 - DNA, 32 bp, synthetic construct; identical to SEQ ID NO: 127
  source 1..32: mol_type = other DNA
  misc_feature 27..29: note = DNA
  misc_feature order(1..26,30..32): note = RNA
  modified_base 28: mod_base = OTHER; note = DNA nucleotide carrying a 6-amino-5-nitro-3-yl-2(1H)-pyridone nucleobase
  modified_base order(25,31..32): mod_base = OTHER; note = 2-Prime-Fluoro modified nucleoside
  modified_base order(1..24,26,30): mod_base = OTHER; note = 2-Prime-O-Methyl modified nucleoside
  modified_base order(1^2,29^30,31^32): mod_base = OTHER; note = (1,3-dimethylimidazolidin-2-ylidene) Phosphoramidate linkage
  modified_base order(2..29,30^31): mod_base = OTHER; note = Phosphorothioate linkage
  misc_feature 1..32: note = RM110717

SEQ ID NO: 926 - DNA, 32 bp, synthetic construct; identical to SEQ ID NO: 128
  source 1..32: mol_type = other DNA
  misc_feature 24..26: note = DNA
  misc_feature order(1..23,27..32): note = RNA
  modified_base 25: mod_base = OTHER; note = DNA nucleotide carrying a 6-amino-5-nitro-3-yl-2(1H)-pyridone nucleobase
  modified_base order(22,28..29): mod_base = OTHER; note = 2-Prime-Fluoro modified nucleoside
  modified_base order(1..21,23,27,30..32): mod_base = OTHER; note = 2-Prime-O-Methyl modified nucleoside
  modified_base order(1^2,26^27,31^32): mod_base = OTHER; note = (1,3-dimethylimidazolidin-2-ylidene) Phosphoramidate linkage
  modified_base order(2..26,27..31): mod_base = OTHER; note = Phosphorothioate linkage
  misc_feature 1..32: note = RM110718

SEQ ID NO: 927 - DNA, 32 bp, synthetic construct; identical to SEQ ID NO: 129
  source 1..32: mol_type = other DNA
  misc_feature 21..23: note = DNA
  misc_feature order(1..20,24..32): note = RNA
  modified_base 22: mod_base = OTHER; note = DNA nucleotide carrying a 6-amino-5-nitro-3-yl-2(1H)-pyridone nucleobase
  modified_base order(19,25..26): mod_base = OTHER; note = 2-Prime-Fluoro modified nucleoside
  modified_base order(1..18,20,24,27..32): mod_base = OTHER; note = 2-Prime-O-Methyl modified nucleoside
  modified_base order(1^2,23^24,31^32): mod_base = OTHER; note = (1,3-dimethylimidazolidin-2-ylidene) Phosphoramidate linkage
  modified_base order(2..23,24..31): mod_base = OTHER; note = Phosphorothioate linkage
  misc_feature 1..32: note = RM110719

SEQ ID NO: 928 - DNA, 32 bp, synthetic construct; identical to SEQ ID NO: 19
  source 1..32: mol_type = other DNA
  misc_feature 18..20: note = DNA
  misc_feature order(1..17,21..32): note = RNA
  modified_base 19: mod_base = OTHER; note = DNA nucleotide carrying a 6-amino-5-nitro-3-yl-2(1H)-pyridone nucleobase
  modified_base order(16,22..23): mod_base = OTHER; note = 2-Prime-Fluoro modified nucleoside
  modified_base order(1..15,17,21,24..32): mod_base = OTHER; note = 2-Prime-O-Methyl modified nucleoside
  modified_base order(1^2,20^21,31^32): mod_base = OTHER; note = (1,3-dimethylimidazolidin-2-ylidene) Phosphoramidate linkage
  modified_base order(2..20,21..31): mod_base = OTHER; note = Phosphorothioate linkage
  misc_feature 1..32: note = RM110720

SEQ ID NO: 929 - DNA, 32 bp, synthetic construct; identical to SEQ ID NO: 131
  source 1..32: mol_type = other DNA
  misc_feature 15..17: note = DNA
  misc_feature order(1..14,18..32): note = RNA
  modified_base 16: mod_base = OTHER; note = DNA nucleotide carrying a 6-amino-5-nitro-3-yl-2(1H)-pyridone nucleobase
  modified_base order(13,19..20): mod_base = OTHER; note = 2-Prime-Fluoro modified nucleoside
  modified_base order(1..12,14,18,21..32): mod_base = OTHER; note = 2-Prime-O-Methyl modified nucleoside
  modified_base order(1^2,17^18,31^32): mod_base = OTHER; note = (1,3-dimethylimidazolidin-2-ylidene) Phosphoramidate linkage
  modified_base order(2..17,18..31): mod_base = OTHER; note = Phosphorothioate linkage
  misc_feature 1..32: note = RM110721

SEQ ID NO: 930 - DNA, 32 bp, synthetic construct; identical to SEQ ID NO: 132
  source 1..32: mol_type = other DNA
  misc_feature 12..14: note = DNA
  misc_feature order(1..11,15..32): note = RNA
  modified_base 13: mod_base = OTHER; note = DNA nucleotide carrying a 6-amino-5-nitro-3-yl-2(1H)-pyridone nucleobase
  modified_base order(10,16..17): mod_base = OTHER; note = 2-Prime-Fluoro modified nucleoside
  modified_base order(1..9,11,15,18..32): mod_base = OTHER; note = 2-Prime-O-Methyl modified nucleoside
  modified_base order(1^2,14^15,31^32): mod_base = OTHER; note = (1,3-dimethylimidazolidin-2-ylidene) Phosphoramidate linkage
  modified_base order(2..14,15..31): mod_base = OTHER; note = Phosphorothioate linkage
  misc_feature 1..32: note = RM110722

SEQ ID NO: 931 - DNA, 32 bp, synthetic construct; identical to SEQ ID NO: 133
  source 1..32: mol_type = other DNA
  misc_feature 9..11: note = DNA
  misc_feature order(1..8,12..32): note = RNA
  modified_base 10: mod_base = OTHER; note = DNA nucleotide carrying a 6-amino-5-nitro-3-yl-2(1H)-pyridone nucleobase
  modified_base order(7,13..14): mod_base = OTHER; note = 2-Prime-Fluoro modified nucleoside
  modified_base order(1..6,8,12,15..32): mod_base = OTHER; note = 2-Prime-O-Methyl modified nucleoside
  modified_base order(1^2,11^12,31^32): mod_base = OTHER; note = (1,3-dimethylimidazolidin-2-ylidene) Phosphoramidate linkage
  modified_base order(2..11,12..31): mod_base = OTHER; note = Phosphorothioate linkage
  misc_feature 1..32: note = RM110723

SEQ ID NO: 932 - DNA, 32 bp, synthetic construct; identical to SEQ ID NO: 134
  source 1..32: mol_type = other DNA
  misc_feature 6..8: note = DNA
  misc_feature order(1..5,9..32): note = RNA
  modified_base 7: mod_base = OTHER; note = DNA nucleotide carrying a 6-amino-5-nitro-3-yl-2(1H)-pyridone nucleobase
  modified_base order(4,10..11): mod_base = OTHER; note = 2-Prime-Fluoro modified nucleoside
  modified_base order(1..3,5,9,12..32): mod_base = OTHER; note = 2-Prime-O-Methyl modified nucleoside
  modified_base order(1^2,8^9,31^32): mod_base = OTHER; note = (1,3-dimethylimidazolidin-2-ylidene) Phosphoramidate linkage
  modified_base order(2..8,9..31): mod_base = OTHER; note = Phosphorothioate linkage
  misc_feature 1..32: note = RM110724

SEQ ID NO: 933 - DNA, 32 bp, synthetic construct; identical to SEQ ID NO: 128
  source 1..32: mol_type = other DNA
  misc_feature 24..26: note = DNA
  misc_feature order(1..23,27..32): note = RNA
  modified_base 25: mod_base = OTHER; note = DNA nucleotide carrying a 6-amino-5-nitro-3-yl-2(1H)-pyridone nucleobase
  modified_base order(23,28,30): mod_base = OTHER; note = 2-Prime-Fluoro modified nucleoside
  modified_base order(1..22,27,29,31..32): mod_base = OTHER; note = 2-Prime-O-Methyl modified nucleoside
  modified_base order(1^2,26^27,31^32): mod_base = OTHER; note = (1,3-dimethylimidazolidin-2-ylidene) Phosphoramidate linkage
  modified_base order(2..26,27..31): mod_base = OTHER; note = Phosphorothioate linkage
  misc_feature 1..32: note = RM110725

SEQ ID NO: 934 - DNA, 32 bp, synthetic construct; identical to SEQ ID NO: 129
  source 1..32: mol_type = other DNA
  misc_feature 21..23: note = DNA
  misc_feature order(1..20,24..32): note = RNA
  modified_base 22: mod_base = OTHER; note = DNA nucleotide carrying a 6-amino-5-nitro-3-yl-2(1H)-pyridone nucleobase
  modified_base order(20,25,27): mod_base = OTHER; note = 2-Prime-Fluoro modified nucleoside
  modified_base order(1..19,24,26,28..32): mod_base = OTHER; note = 2-Prime-O-Methyl modified nucleoside
  modified_base order(1^2,23^24,31^32): mod_base = OTHER; note = (1,3-dimethylimidazolidin-2-ylidene) Phosphoramidate linkage
  modified_base order(2..23,24..31): mod_base = OTHER; note = Phosphorothioate linkage
  misc_feature 1..32: note = RM110726

SEQ ID NO: 935 - DNA, 32 bp, synthetic construct; identical to SEQ ID NO: 19
  source 1..32: mol_type = other DNA
  misc_feature 18..20: note = DNA
  misc_feature order(1..17,21..32): note = RNA
  modified_base 19: mod_base = OTHER; note = DNA nucleotide carrying a 6-amino-5-nitro-3-yl-2(1H)-pyridone nucleobase
  modified_base order(17,22,24): mod_base = OTHER; note = 2-Prime-Fluoro modified nucleoside
  modified_base order(1..16,21,23,25..32): mod_base = OTHER; note = 2-Prime-O-Methyl modified nucleoside
  modified_base order(1^2,20^21,31^32): mod_base = OTHER; note = (1,3-dimethylimidazolidin-2-ylidene) Phosphoramidate linkage
  modified_base order(2..20,21..31): mod_base = OTHER; note = Phosphorothioate linkage
  misc_feature 1..32: note = RM110727

SEQ ID NO: 936 - DNA, 32 bp, synthetic construct; identical to SEQ ID NO: 131
  source 1..32: mol_type = other DNA
  misc_feature 15..17: note = DNA
  misc_feature order(1..14,18..32): note = RNA
  modified_base 16: mod_base = OTHER; note = DNA nucleotide carrying a 6-amino-5-nitro-3-yl-2(1H)-pyridone nucleobase
  modified_base order(14,19,21): mod_base = OTHER; note = 2-Prime-Fluoro modified nucleoside
  modified_base order(1..13,18,20,22..32): mod_base = OTHER; note = 2-Prime-O-Methyl modified nucleoside
  modified_base order(1^2,17^18,31^32): mod_base = OTHER; note = (1,3-dimethylimidazolidin-2-ylidene) Phosphoramidate linkage
  modified_base order(2..17,18..31): mod_base = OTHER; note = Phosphorothioate linkage
  misc_feature 1..32: note = RM110728

SEQ ID NO: 937 - DNA, 32 bp, synthetic construct; identical to SEQ ID NO: 132
  source 1..32: mol_type = other DNA
  misc_feature 12..14: note = DNA
  misc_feature order(1..11,15..32): note = RNA
  modified_base 13: mod_base = OTHER; note = DNA nucleotide carrying a 6-amino-5-nitro-3-yl-2(1H)-pyridone nucleobase
  modified_base order(11,16,18): mod_base = OTHER; note = 2-Prime-Fluoro modified nucleoside
  modified_base order(1..10,15,17,19..32): mod_base = OTHER; note = 2-Prime-O-Methyl modified nucleoside
  modified_base order(1^2,14^15,31^32): mod_base = OTHER; note = (1,3-dimethylimidazolidin-2-ylidene) Phosphoramidate linkage
  modified_base order(2..14,15..31): mod_base = OTHER; note = Phosphorothioate linkage
  misc_feature 1..32: note = RM110729

SEQ ID NO: 938 - DNA, 32 bp, synthetic construct; identical to SEQ ID NO: 133
  source 1..32: mol_type = other DNA
  misc_feature 9..11: note = DNA
  misc_feature order(1..8,12..32): note = RNA
  modified_base 10: mod_base = OTHER; note = DNA nucleotide carrying a 6-amino-5-nitro-3-yl-2(1H)-pyridone nucleobase
  modified_base order(8,13,15): mod_base = OTHER; note = 2-Prime-Fluoro modified nucleoside
  modified_base order(1..7,12,14,16..32): mod_base = OTHER; note = 2-Prime-O-Methyl modified nucleoside
  modified_base order(1^2,11^12,31^32): mod_base = OTHER; note = (1,3-dimethylimidazolidin-2-ylidene) Phosphoramidate linkage
  modified_base order(2..11,12..31): mod_base = OTHER; note = Phosphorothioate linkage
  misc_feature 1..32: note = RM110730

SEQ ID NO: 939 - DNA, 32 bp, synthetic construct; identical to SEQ ID NO: 134
  source 1..32: mol_type = other DNA
  misc_feature 6..8: note = DNA
  misc_feature order(1..5,9..32): note = RNA
  modified_base 7: mod_base = OTHER; note = DNA nucleotide carrying a 6-amino-5-nitro-3-yl-2(1H)-pyridone nucleobase
  modified_base order(5,10,12): mod_base = OTHER; note = 2-Prime-Fluoro modified nucleoside
  modified_base order(1..4,9,11,13..32): mod_base = OTHER; note = 2-Prime-O-Methyl modified nucleoside
  modified_base order(1^2,8^9,31^32): mod_base = OTHER; note = (1,3-dimethylimidazolidin-2-ylidene) Phosphoramidate linkage
  modified_base order(2..8,9..31): mod_base = OTHER; note = Phosphorothioate linkage
  misc_feature 1..32: note = RM110731

SEQ ID NO: 940 - DNA, 32 bp, synthetic construct; identical to SEQ ID NO: 19
  source 1..32: mol_type = other DNA
  misc_feature 18..20: note = DNA
  misc_feature order(1..17,21..32): note = RNA
  modified_base 19: mod_base = OTHER; note = DNA nucleotide carrying a 6-amino-5-nitro-3-yl-2(1H)-pyridone nucleobase
  modified_base order(2,5,8,10,17,22,25,27,32): mod_base = OTHER; note = 2-Prime-Fluoro modified nucleoside
  modified_base order(1,3..4,6..7,9,11..16,21,23..24,26,28..31): mod_base = OTHER; note = 2-Prime-O-Methyl modified nucleoside
  modified_base order(1^2,20^21,31^32): mod_base = OTHER; note = (1,3-dimethylimidazolidin-2-ylidene) Phosphoramidate linkage
  modified_base order(2..20,21..31): mod_base = OTHER; note = Phosphorothioate linkage
  misc_feature 1..32: note = RM110732

SEQ ID NO: 941 - DNA, 32 bp, synthetic construct; identical to SEQ ID NO: 132
  source 1..32: mol_type = other DNA
  misc_feature 12..14: note = DNA
  misc_feature order(1..11,15..32): note = RNA
  modified_base 13: mod_base = OTHER; note = DNA nucleotide carrying a 6-amino-5-nitro-3-yl-2(1H)-pyridone nucleobase
  modified_base order(2,7,9,16..17,24,26,29,32): mod_base = OTHER; note = 2-Prime-Fluoro modified nucleoside
  modified_base order(1,3..6,8,10..11,15,18..23,25,27..28,30..31): mod_base = OTHER; note = 2-Prime-O-Methyl modified nucleoside
  modified_base order(1^2,14^15,31^32): mod_base = OTHER; note = (1,3-dimethylimidazolidin-2-ylidene) Phosphoramidate linkage
  modified_base order(2..14,15..31): mod_base = OTHER; note = Phosphorothioate linkage
  misc_feature 1..32: note = RM110733

SEQ ID NO: 942 - DNA, 23 bp, synthetic construct
  source 1..23: mol_type = other DNA
  misc_feature 14..16: note = DNA
  misc_feature order(1..13,17..23): note = RNA
  modified_base 15: mod_base = OTHER; note = DNA nucleotide carrying a 6-amino-5-nitro-3-yl-2(1H)-pyridone nucleobase
  modified_base order(1,4,6,13,18,21): mod_base = OTHER; note = 2-Prime-Fluoro modified nucleoside
  modified_base order(2..3,5,7..12,17,19..20,22..23): mod_base = OTHER; note = 2-Prime-O-Methyl modified nucleoside
  modified_base order(1^2,16^17,22^23): mod_base = OTHER; note = (1,3-dimethylimidazolidin-2-ylidene) Phosphoramidate linkage
  modified_base order(2..16,17..22): mod_base = OTHER; note = Phosphorothioate linkage
  misc_feature 1..23: note = RM110734
caaacctctgaggantgggttca

SEQ ID NO: 943 - DNA, 32 bp, synthetic construct; identical to SEQ ID NO: 128
  source 1..32: mol_type = other DNA
  misc_feature 24..26: note = DNA
  misc_feature order(1..23,27..32): note = RNA
  modified_base 25: mod_base = OTHER; note = DNA nucleotide carrying a 6-amino-5-nitro-3-yl-2(1H)-pyridone nucleobase
  modified_base order(11,14,16,23,28,31): mod_base = OTHER; note = 2-Prime-Fluoro modified nucleoside
  modified_base order(1..10,12..13,15,17..22,27,29..30,32): mod_base = OTHER; note = 2-Prime-O-Methyl modified nucleoside
  modified_base order(1^2,26^27,31^32): mod_base = OTHER; note = (1,3-dimethylimidazolidin-2-ylidene) Phosphoramidate linkage
  modified_base order(2..26,27..31): mod_base = OTHER; note = Phosphorothioate linkage
  misc_feature 1..32: note = RM110735

SEQ ID NO: 944 - DNA, 32 bp, synthetic construct; identical to SEQ ID NO: 129
  source 1..32: mol_type = other DNA
  misc_feature 21..23: note = DNA
  misc_feature order(1..20,24..32): note = RNA
  modified_base 22: mod_base = OTHER; note = DNA nucleotide carrying a 6-amino-5-nitro-3-yl-2(1H)-pyridone nucleobase
  modified_base order(8,11,13,20,25,28): mod_base = OTHER; note = 2-Prime-Fluoro modified nucleoside
  modified_base order(1..7,9..10,12,14..19,24,26..27,29..32): mod_base = OTHER; note = 2-Prime-O-Methyl modified nucleoside
  modified_base order(1^2,23^24,31^32): mod_base = OTHER; note = (1,3-dimethylimidazolidin-2-ylidene) Phosphoramidate linkage
  modified_base order(2..23,24..31): mod_base = OTHER; note = Phosphorothioate linkage
  misc_feature 1..32: note = RM110736

SEQ ID NO: 945 - DNA, 32 bp, synthetic construct; identical to SEQ ID NO: 19
  source 1..32: mol_type = other DNA
  misc_feature 18..20: note = DNA
  misc_feature order(1..17,21..32): note = RNA
  modified_base 19: mod_base = OTHER; note = DNA nucleotide carrying a 6-amino-5-nitro-3-yl-2(1H)-pyridone nucleobase
  modified_base order(5,8,10,17,22,25): mod_base = OTHER; note = 2-Prime-Fluoro modified nucleoside
  modified_base order(1..4,6..7,9,11..16,21,23..24,26..32): mod_base = OTHER; note = 2-Prime-O-Methyl modified nucleoside
  modified_base order(1^2,20^21,31^32): mod_base = OTHER; note = (1,3-dimethylimidazolidin-2-ylidene) Phosphoramidate linkage
  modified_base order(2..20,21..31): mod_base = OTHER; note = Phosphorothioate linkage
  misc_feature 1..32: note = RM110737

SEQ ID NO: 946 - DNA, 32 bp, synthetic construct; identical to SEQ ID NO: 131
  source 1..32: mol_type = other DNA
  misc_feature 15..17: note = DNA
  misc_feature order(1..14,18..32): note = RNA
  modified_base 16: mod_base = OTHER; note = DNA nucleotide carrying a 6-amino-5-nitro-3-yl-2(1H)-pyridone nucleobase
  modified_base order(2,5,7,14,19,22): mod_base = OTHER; note = 2-Prime-Fluoro modified nucleoside
  modified_base order(1,3..4,6,8..13,18,20..21,23..32): mod_base = OTHER; note = 2-Prime-O-Methyl modified nucleoside
  modified_base order(1^2,17^18,31^32): mod_base = OTHER; note = (1,3-dimethylimidazolidin-2-ylidene) Phosphoramidate linkage
  modified_base order(2..17,18..31): mod_base = OTHER; note = Phosphorothioate linkage
  misc_feature 1..32: note = RM110738

SEQ ID NO: 947 - DNA, 23 bp, synthetic construct
  source 1..23: mol_type = other DNA
  misc_feature 5..7: note = DNA
  misc_feature order(1..4,8..23): note = RNA
  modified_base 6: mod_base = OTHER; note = DNA nucleotide carrying a 6-amino-5-nitro-3-yl-2(1H)-pyridone nucleobase
  modified_base order(2,9..10,17,19,22): mod_base = OTHER; note = 2-Prime-Fluoro modified nucleoside
  modified_base order(1,3..4,8,11..16,18,20..21,23): mod_base = OTHER; note = 2-Prime-O-Methyl modified nucleoside
  modified_base order(1^2,7^8,22^23): mod_base = OTHER; note = (1,3-dimethylimidazolidin-2-ylidene) Phosphoramidate linkage
  modified_base order(2..7,8..22): mod_base = OTHER; note = Phosphorothioate linkage
  misc_feature 1..23: note = RM110739
gaggantgggttcatttttcttg

SEQ ID NO: 948 - DNA, 32 bp, synthetic construct; identical to SEQ ID NO: 131
  source 1..32: mol_type = other DNA
  misc_feature 15..17: note = DNA
  misc_feature order(1..14,18..32): note = RNA
  modified_base 16: mod_base = OTHER; note = DNA nucleotide carrying a 6-amino-5-nitro-3-yl-2(1H)-pyridone nucleobase
  modified_base order(12,19..20,27,29,32): mod_base = OTHER; note = 2-Prime-Fluoro modified nucleoside
  modified_base order(1..11,13..14,18,21..26,28,30..31): mod_base = OTHER; note = 2-Prime-O-Methyl modified nucleoside
  modified_base order(1^2,17^18,31^32): mod_base = OTHER; note = (1,3-dimethylimidazolidin-2-ylidene) Phosphoramidate linkage
  modified_base order(2..17,18..31): mod_base = OTHER; note = Phosphorothioate linkage
  misc_feature 1..32: note = RM110740

SEQ ID NO: 949 - DNA, 32 bp, synthetic construct; identical to SEQ ID NO: 132
  source 1..32: mol_type = other DNA
  misc_feature 12..14: note = DNA
  misc_feature order(1..11,15..32): note = RNA
  modified_base 13: mod_base = OTHER; note = DNA nucleotide carrying a 6-amino-5-nitro-3-yl-2(1H)-pyridone nucleobase
  modified_base order(9,16..17,24,26,29): mod_base = OTHER; note = 2-Prime-Fluoro modified nucleoside
  modified_base order(1..8,10..11,15,18..23,25,27..28,30..32): mod_base = OTHER; note = 2-Prime-O-Methyl modified nucleoside
  modified_base order(1^2,14^15,31^32): mod_base = OTHER; note = (1,3-dimethylimidazolidin-2-ylidene) Phosphoramidate linkage
  modified_base order(2..14,15..31): mod_base = OTHER; note = Phosphorothioate linkage
  misc_feature 1..32: note = RM110741

SEQ ID NO: 950 - DNA, 32 bp, synthetic construct; identical to SEQ ID NO: 133
  source 1..32: mol_type = other DNA
  misc_feature 9..11: note = DNA
  misc_feature order(1..8,12..32): note = RNA
  modified_base 10: mod_base = OTHER; note = DNA nucleotide carrying a 6-amino-5-nitro-3-yl-2(1H)-pyridone nucleobase
  modified_base order(6,13..14,21,23,26): mod_base = OTHER; note = 2-Prime-Fluoro modified nucleoside
  modified_base order(1..5,7..8,12,15..20,22,24..25,27..32): mod_base = OTHER; note = 2-Prime-O-Methyl modified nucleoside
  modified_base order(1^2,11^12,31^32): mod_base = OTHER; note = (1,3-dimethylimidazolidin-2-ylidene) Phosphoramidate linkage
  modified_base order(2..11,12..31): mod_base = OTHER; note = Phosphorothioate linkage
  misc_feature 1..32: note = RM110742

SEQ ID NO: 951 - DNA, 32 bp, synthetic construct; identical to SEQ ID NO: 134
  source 1..32: mol_type = other DNA
  misc_feature 6..8: note = DNA
  misc_feature order(1..5,9..32): note = RNA
  modified_base 7: mod_base = OTHER; note = DNA nucleotide carrying a 6-amino-5-nitro-3-yl-2(1H)-pyridone nucleobase
  modified_base order(3,10..11,18,20,23): mod_base = OTHER; note = 2-Prime-Fluoro modified nucleoside
  modified_base order(1..2,4..5,9,12..17,19,21..22,24..32): mod_base = OTHER; note = 2-Prime-O-Methyl modified nucleoside
  modified_base order(1^2,8^9,31^32): mod_base = OTHER; note = (1,3-dimethylimidazolidin-2-ylidene) Phosphoramidate linkage
  modified_base order(2..8,9..31): mod_base = OTHER; note = Phosphorothioate linkage
  misc_feature 1..32: note = RM110743

SEQ ID NO: 952 - DNA, 32 bp, synthetic construct; identical to SEQ ID NO: 128
  source 1..32: mol_type = other DNA
  misc_feature 24..26: note = DNA
  misc_feature order(1..23,27..32): note = RNA
  modified_base 25: mod_base = OTHER; note = DNA nucleotide carrying a 6-amino-5-nitro-3-yl-2(1H)-pyridone nucleobase
  modified_base order(23,28,31): mod_base = OTHER; note = 2-Prime-Fluoro modified nucleoside
  modified_base order(1..22,27,29..30,32): mod_base = OTHER; note = 2-Prime-O-Methyl modified nucleoside
  modified_base order(1^2,26^27,31^32): mod_base = OTHER; note = (1,3-dimethylimidazolidin-2-ylidene) Phosphoramidate linkage
  modified_base order(2..26,27..31): mod_base = OTHER; note = Phosphorothioate linkage
  misc_feature 1..32: note = RM110744

SEQ ID NO: 953 - DNA, 32 bp, synthetic construct; identical to SEQ ID NO: 129
  source 1..32: mol_type = other DNA
  misc_feature 21..23: note = DNA
  misc_feature order(1..20,24..32): note = RNA
  modified_base 22: mod_base = OTHER; note = DNA nucleotide carrying a 6-amino-5-nitro-3-yl-2(1H)-pyridone nucleobase
  modified_base order(20,25,28): mod_base = OTHER; note = 2-Prime-Fluoro modified nucleoside
  modified_base order(1..19,24,26..27,29..32): mod_base = OTHER; note = 2-Prime-O-Methyl modified nucleoside
  modified_base order(1^2,23^24,31^32): mod_base = OTHER; note = (1,3-dimethylimidazolidin-2-ylidene) Phosphoramidate linkage
  modified_base order(2..23,24..31): mod_base = OTHER; note = Phosphorothioate linkage
  misc_feature 1..32: note = RM110745

SEQ ID NO: 954 - DNA, 32 bp, synthetic construct; identical to SEQ ID NO: 19
  source 1..32: mol_type = other DNA
  misc_feature 18..20: note = DNA
  misc_feature order(1..17,21..32): note = RNA
  modified_base 19: mod_base = OTHER; note = DNA nucleotide carrying a 6-amino-5-nitro-3-yl-2(1H)-pyridone nucleobase
  modified_base order(17,22,25): mod_base = OTHER; note = 2-Prime-Fluoro modified nucleoside
  modified_base order(1..16,21,23..24,26..32): mod_base = OTHER; note = 2-Prime-O-Methyl modified nucleoside
  modified_base order(1^2,20^21,31^32): mod_base = OTHER; note = (1,3-dimethylimidazolidin-2-ylidene) Phosphoramidate linkage
  modified_base order(2..20,21..31): mod_base = OTHER; note = Phosphorothioate linkage
  misc_feature 1..32: note = RM110746

SEQ ID NO: 955 - DNA, 32 bp, synthetic construct; identical to SEQ ID NO: 131
  source 1..32: mol_type = other DNA
  misc_feature 15..17: note = DNA
  misc_feature order(1..14,18..32): note = RNA
  modified_base 16: mod_base = OTHER; note = DNA nucleotide carrying a 6-amino-5-nitro-3-yl-2(1H)-pyridone nucleobase
  modified_base order(14,19,22): mod_base = OTHER; note = 2-Prime-Fluoro modified nucleoside
  modified_base order(1..13,18,20..21,23..32): mod_base = OTHER; note = 2-Prime-O-Methyl modified nucleoside
  modified_base order(1^2,17^18,31^32): mod_base = OTHER; note = (1,3-dimethylimidazolidin-2-ylidene) Phosphoramidate linkage
  modified_base order(2..17,18..31): mod_base = OTHER; note = Phosphorothioate linkage
  misc_feature 1..32: note = RM110747

SEQ ID NO: 956 - DNA, 32 bp, synthetic construct; identical to SEQ ID NO: 132
  source 1..32: mol_type = other DNA
  misc_feature 12..14: note = DNA
  misc_feature order(1..11,15..32): note = RNA
  modified_base 13: mod_base = OTHER; note = DNA nucleotide carrying a 6-amino-5-nitro-3-yl-2(1H)-pyridone nucleobase
  modified_base order(11,16,19): mod_base = OTHER; note = 2-Prime-Fluoro modified nucleoside
  modified_base order(1..10,15,17..18,20..32): mod_base = OTHER; note = 2-Prime-O-Methyl modified nucleoside
  modified_base order(1^2,14^15,31^32): mod_base = OTHER; note = (1,3-dimethylimidazolidin-2-ylidene) Phosphoramidate linkage
  modified_base order(2..14,15..31): mod_base = OTHER; note = Phosphorothioate linkage
  misc_feature 1..32: note = RM110748

SEQ ID NO: 957 - DNA, 32 bp, synthetic construct; identical to SEQ ID NO: 133
  source 1..32: mol_type = other DNA
  misc_feature 9..11: note = DNA
  misc_feature order(1..8,12..32): note = RNA
  modified_base 10: mod_base = OTHER; note = DNA nucleotide carrying a 6-amino-5-nitro-3-yl-2(1H)-pyridone nucleobase
  modified_base order(8,13,16): mod_base = OTHER; note = 2-Prime-Fluoro modified nucleoside
  modified_base order(1..7,12,14..15,17..32): mod_base = OTHER; note = 2-Prime-O-Methyl modified nucleoside
  modified_base order(1^2,11^12,31^32): mod_base = OTHER; note = (1,3-dimethylimidazolidin-2-ylidene) Phosphoramidate linkage
  modified_base order(2..11,12..31): mod_base = OTHER; note = Phosphorothioate linkage
  misc_feature 1..32: note = RM110749

SEQ ID NO: 958 - DNA, 32 bp, synthetic construct; identical to SEQ ID NO: 134
  source 1..32: mol_type = other DNA
  misc_feature 6..8: note = DNA
  misc_feature order(1..5,9..32): note = RNA
  modified_base 7: mod_base = OTHER; note = DNA nucleotide carrying a 6-amino-5-nitro-3-yl-2(1H)-pyridone nucleobase
  modified_base order(5,10,13): mod_base = OTHER; note = 2-Prime-Fluoro modified nucleoside
  modified_base order(1..4,9,11..12,14..32): mod_base = OTHER; note = 2-Prime-O-Methyl modified nucleoside
  modified_base order(1^2,8^9,31^32): mod_base = OTHER; note = (1,3-dimethylimidazolidin-2-ylidene) Phosphoramidate linkage
  modified_base order(2..8,9..31): mod_base = OTHER; note = Phosphorothioate linkage
  misc_feature 1..32: note = RM110750

SEQ ID NO: 959 - DNA, 32 bp, synthetic construct; identical to SEQ ID NO: 127
  source 1..32: mol_type = other DNA
  misc_feature 27..29: note = DNA
  misc_feature order(1..26,30..32): note = RNA
  modified_base 28: mod_base = OTHER; note = DNA nucleotide carrying a 6-amino-5-nitro-3-yl-2(1H)-pyridone nucleobase
  modified_base order(24,31..32): mod_base = OTHER; note = 2-Prime-Fluoro modified nucleoside
  modified_base order(1..23,25..26,30): mod_base = OTHER; note = 2-Prime-O-Methyl modified nucleoside
  modified_base order(1^2,29^30,31^32): mod_base = OTHER; note = (1,3-dimethylimidazolidin-2-ylidene) Phosphoramidate linkage
  modified_base order(2..29,30^31): mod_base = OTHER; note = Phosphorothioate linkage
  misc_feature 1..32: note = RM110751

SEQ ID NO: 960 - DNA, 32 bp, synthetic construct; identical to SEQ ID NO: 128
  source 1..32: mol_type = other DNA
  misc_feature 24..26: note = DNA
  misc_feature order(1..23,27..32): note = RNA
  modified_base 25: mod_base = OTHER; note = DNA nucleotide carrying a 6-amino-5-nitro-3-yl-2(1H)-pyridone nucleobase
  modified_base order(21,28..29): mod_base = OTHER; note = 2-Prime-Fluoro modified nucleoside
  modified_base order(1..20,22..23,27,30..32): mod_base = OTHER; note = 2-Prime-O-Methyl modified nucleoside
  modified_base order(1^2,26^27,31^32): mod_base = OTHER; note = (1,3-dimethylimidazolidin-2-ylidene) Phosphoramidate linkage
  modified_base order(2..26,27..31): mod_base = OTHER; note = Phosphorothioate linkage
  misc_feature 1..32: note = RM110752

SEQ ID NO: 961 - DNA, 32 bp, synthetic construct; identical to SEQ ID NO: 129
  source 1..32: mol_type = other DNA
  misc_feature 21..23: note = DNA
  misc_feature order(1..20,24..32): note = RNA
  modified_base 22: mod_base = OTHER; note = DNA nucleotide carrying a 6-amino-5-nitro-3-yl-2(1H)-pyridone nucleobase
  modified_base order(18,25..26): mod_base = OTHER; note = 2-Prime-Fluoro modified nucleoside
  modified_base order(1..17,19..20,24,27..32): mod_base = OTHER; note = 2-Prime-O-Methyl modified nucleoside
  modified_base order(1^2,23^24,31^32): mod_base = OTHER; note = (1,3-dimethylimidazolidin-2-ylidene) Phosphoramidate linkage
  modified_base order(2..23,24..31): mod_base = OTHER; note = Phosphorothioate linkage
  misc_feature 1..32: note = RM110753

SEQ ID NO: 962 - DNA, 32 bp, synthetic construct; identical to SEQ ID NO: 19
  source 1..32: mol_type = other DNA
  misc_feature 18..20: note = DNA
  misc_feature order(1..17,21..32): note = RNA
  modified_base 19: mod_base = OTHER; note = DNA nucleotide carrying a 6-amino-5-nitro-3-yl-2(1H)-pyridone nucleobase
  modified_base order(15,22..23): mod_base = OTHER; note = 2-Prime-Fluoro modified nucleoside
  modified_base order(1..14,16..17,21,24..32): mod_base = OTHER; note = 2-Prime-O-Methyl modified nucleoside
  modified_base order(1^2,20^21,31^32): mod_base = OTHER; note = (1,3-dimethylimidazolidin-2-ylidene) Phosphoramidate linkage
  modified_base order(2..20,21..31): mod_base = OTHER; note = Phosphorothioate linkage
  misc_feature 1..32: note = RM110754

SEQ ID NO: 963 - DNA, 32 bp, synthetic construct; identical to SEQ ID NO: 131
  source 1..32: mol_type = other DNA
  misc_feature 15..17: note = DNA
  misc_feature order(1..14,18..32): note = RNA
  modified_base 16: mod_base = OTHER; note = DNA nucleotide carrying a 6-amino-5-nitro-3-yl-2(1H)-pyridone nucleobase
  modified_base order(12,19..20): mod_base = OTHER; note = 2-Prime-Fluoro modified nucleoside
  modified_base order(1..11,13..14,18,21..32): mod_base = OTHER; note = 2-Prime-O-Methyl modified nucleoside
  modified_base order(1^2,17^18,31^32): mod_base = OTHER; note = (1,3-dimethylimidazolidin-2-ylidene) Phosphoramidate linkage
  modified_base order(2..17,18..31): mod_base = OTHER; note = Phosphorothioate linkage
  misc_feature 1..32: note = RM110755

SEQ ID NO: 964 - DNA, 32 bp, synthetic construct; identical to SEQ ID NO: 132
  source 1..32: mol_type = other DNA
  misc_feature 12..14: note = DNA
  misc_feature order(1..11,15..32): note = RNA
  modified_base 13: mod_base = OTHER; note = DNA nucleotide carrying a 6-amino-5-nitro-3-yl-2(1H)-pyridone nucleobase
  modified_base order(9,16..17): mod_base = OTHER; note = 2-Prime-Fluoro modified nucleoside
  modified_base order(1..8,10..11,15,18..32): mod_base = OTHER; note = 2-Prime-O-Methyl modified nucleoside
  modified_base order(1^2,14^15,31^32): mod_base = OTHER; note = (1,3-dimethylimidazolidin-2-ylidene) Phosphoramidate linkage
  modified_base order(2..14,15..31): mod_base = OTHER; note = Phosphorothioate linkage
  misc_feature 1..32: note = RM110756

SEQ ID NO: 965 - DNA, 32 bp, synthetic construct; identical to SEQ ID NO: 133
  source 1..32: mol_type = other DNA
  misc_feature 9..11: note = DNA
  misc_feature order(1..8,12..32): note = RNA
  modified_base 10: mod_base = OTHER; note = DNA nucleotide carrying a 6-amino-5-nitro-3-yl-2(1H)-pyridone nucleobase
  modified_base order(6,13..14): mod_base = OTHER; note = 2-Prime-Fluoro modified nucleoside
  modified_base order(1..5,7..8,12,15..32): mod_base = OTHER; note = 2-Prime-O-Methyl modified nucleoside
  modified_base order(1^2,11^12,31^32): mod_base = OTHER; note = (1,3-dimethylimidazolidin-2-ylidene) Phosphoramidate linkage
  modified_base order(2..11,12..31): mod_base = OTHER; note = Phosphorothioate linkage
  misc_feature 1..32: note = RM110757

SEQ ID NO: 966 - DNA, 32 bp, synthetic construct; identical to SEQ ID NO: 134
  source 1..32: mol_type = other DNA
  misc_feature 6..8: note = DNA
  misc_feature order(1..5,9..32): note = RNA
  modified_base 7: mod_base = OTHER; note = DNA nucleotide carrying a 6-amino-5-nitro-3-yl-2(1H)-pyridone nucleobase
  modified_base order(3,10..11): mod_base = OTHER; note = 2-Prime-Fluoro modified nucleoside
  modified_base order(1..2,4..5,9,12..32): mod_base = OTHER; note = 2-Prime-O-Methyl modified nucleoside
  modified_base order(1^2,8^9,31^32): mod_base = OTHER; note = (1,3-dimethylimidazolidin-2-ylidene) Phosphoramidate linkage
  modified_base order(2..8,9..31): mod_base = OTHER; note = Phosphorothioate linkage
  misc_feature 1..32: note = RM110758

SEQ ID NO: 967 - DNA, 32 bp, synthetic construct; identical to SEQ ID NO: 133
  source 1..32: mol_type = other DNA
  misc_feature 9..11: note = DNA
  misc_feature order(1..8,12..32): note = RNA
  modified_base 10: mod_base = OTHER; note = DNA nucleotide carrying a 6-amino-5-nitro-3-yl-2(1H)-pyridone nucleobase
  modified_base order(3,13..14,24,29..30): mod_base = OTHER; note = 2-Prime-Fluoro modified nucleoside
  modified_base order(1..2,4..8,12,15..23,25..28,31..32): mod_base = OTHER; note = 2-Prime-O-Methyl modified nucleoside
  modified_base order(1^2,11^12,31^32): mod_base = OTHER; note = (1,3-dimethylimidazolidin-2-ylidene) Phosphoramidate linkage
  modified_base order(2..11,12..31): mod_base = OTHER; note = Phosphorothioate linkage
  misc_feature 1..32: note = RM110759

SEQ ID NO: 968 - DNA, 32 bp, synthetic construct; identical to SEQ ID NO: 129
  source 1..32: mol_type = other DNA
  misc_feature 21..23: note = DNA
  misc_feature order(1..20,24..32): note = RNA
  modified_base 22: mod_base = OTHER; note = DNA nucleotide carrying a 6-amino-5-nitro-3-yl-2(1H)-pyridone nucleobase
  modified_base order(4..5,10,20,25,31): mod_base = OTHER; note = 2-Prime-Fluoro modified nucleoside
  modified_base order(1..3,6..9,11..19,24,26..30,32): mod_base = OTHER; note = 2-Prime-O-Methyl modified nucleoside
  modified_base order(1^2,23^24,31^32): mod_base = OTHER; note = (1,3-dimethylimidazolidin-2-ylidene) Phosphoramidate linkage
  modified_base order(2..23,24..31): mod_base = OTHER; note = Phosphorothioate linkage
  misc_feature 1..32: note = RM110760

SEQ ID NO: 969 - DNA, 32 bp, synthetic construct; identical to SEQ ID NO: 19
  source 1..32: mol_type = other DNA
  misc_feature 18..20: note = DNA
  misc_feature order(1..17,21..32): note = RNA
  modified_base 19: mod_base = OTHER; note = DNA nucleotide carrying a 6-amino-5-nitro-3-yl-2(1H)-pyridone nucleobase
  modified_base order(1..2,7,17,22,28): mod_base = OTHER; note = 2-Prime-Fluoro modified nucleoside
  modified_base order(3..6,8..16,21,23..27,29..32): mod_base = OTHER; note = 2-Prime-O-Methyl modified nucleoside
  modified_base order(1^2,20^21,31^32): mod_base = OTHER; note = (1,3-dimethylimidazolidin-2-ylidene) Phosphoramidate linkage
  modified_base order(2..20,21..31): mod_base = OTHER; note = Phosphorothioate linkage
  misc_feature 1..32: note = RM110761

SEQ ID NO: 970 - DNA, 23 bp, synthetic construct
  source 1..23: mol_type = other DNA
  misc_feature 8..10: note = DNA
  misc_feature order(1..7,11..23): note = RNA
  modified_base 9: mod_base = OTHER; note = DNA nucleotide carrying a 6-amino-5-nitro-3-yl-2(1H)-pyridone nucleobase
  modified_base order(2,12..13,23): mod_base = OTHER; note = 2-Prime-Fluoro modified nucleoside
  modified_base order(1,3..7,11,14..22): mod_base = OTHER; note = 2-Prime-O-Methyl modified nucleoside
  modified_base order(1^2,10^11,22^23): mod_base = OTHER; note = (1,3-dimethylimidazolidin-2-ylidene) Phosphoramidate linkage
  modified_base order(2..10,11..22): mod_base = OTHER; note = Phosphorothioate linkage
  misc_feature 1..23: note = RM110762
tctgaggantgggttcatttttc

SEQ ID NO: 971 - DNA, 23 bp, synthetic construct
  source 1..23: mol_type = other DNA
  misc_feature 17..19: note = DNA
  misc_feature order(1..16,20..23): note = RNA
  modified_base 18: mod_base = OTHER; note = DNA nucleotide carrying a 6-amino-5-nitro-3-yl-2(1H)-pyridone nucleobase
  modified_base order(11,21): mod_base = OTHER; note = 2-Prime-Fluoro modified nucleoside
  modified_base order(1..10,12..16,20,22..23): mod_base = OTHER; note = 2-Prime-O-Methyl modified nucleoside
  modified_base order(1^2,19^20,22^23): mod_base = OTHER; note = (1,3-dimethylimidazolidin-2-ylidene) Phosphoramidate linkage
  modified_base order(2..19,20..22): mod_base = OTHER; note = Phosphorothioate linkage
  misc_feature 1..23: note = RM110763
ggtcaaacctctgaggantgggt

SEQ ID NO: 972 - DNA, 23 bp, synthetic construct
  source 1..23: mol_type = other DNA
  misc_feature 14..16: note = DNA
  misc_feature order(1..13,17..23): note = RNA
  modified_base 15: mod_base = OTHER; note = DNA nucleotide carrying a 6-amino-5-nitro-3-yl-2(1H)-pyridone nucleobase
  modified_base order(8,18): mod_base = OTHER; note = 2-Prime-Fluoro modified nucleoside
  modified_base order(1..7,9..13,17,19..23): mod_base = OTHER; note = 2-Prime-O-Methyl modified nucleoside
  modified_base order(1^2,16^17,22^23): mod_base = OTHER; note = (1,3-dimethylimidazolidin-2-ylidene) Phosphoramidate linkage
  modified_base order(2..16,17..22): mod_base = OTHER; note = Phosphorothioate linkage
  misc_feature 1..23: note = RM110764
caaacctctgaggantgggttca

SEQ ID NO: 973 - DNA, 23 bp, synthetic construct
  source 1..23: mol_type = other DNA
  misc_feature 11..13: note = DNA
  misc_feature order(1..10,14..23): note = RNA
  modified_base 12: mod_base = OTHER; note = DNA nucleotide carrying a 6-amino-5-nitro-3-yl-2(1H)-pyridone nucleobase
  modified_base order(5,15): mod_base = OTHER; note = 2-Prime-Fluoro modified nucleoside
  modified_base order(1..4,6..10,14,16..23): mod_base = OTHER; note = 2-Prime-O-Methyl modified nucleoside
  modified_base order(1^2,13^14,22^23): mod_base = OTHER; note = (1,3-dimethylimidazolidin-2-ylidene) Phosphoramidate linkage
  modified_base order(2..13,14..22): mod_base = OTHER; note = Phosphorothioate linkage
  misc_feature 1..23: note = RM110765
acctctgaggantgggttcattt

SEQ ID NO: 974 - DNA, 23 bp, synthetic construct
  source 1..23: mol_type = other DNA
  misc_feature 8..10: note = DNA
  misc_feature order(1..7,11..23): note = RNA
  modified_base 9: mod_base = OTHER; note = DNA nucleotide carrying a 6-amino-5-nitro-3-yl-2(1H)-pyridone nucleobase
  modified_base order(2,12): mod_base = OTHER; note = 2-Prime-Fluoro modified nucleoside
  modified_base order(1,3..7,11,13..23): mod_base = OTHER; note = 2-Prime-O-Methyl modified nucleoside
  modified_base order(1^2,10^11,22^23): mod_base = OTHER; note = (1,3-dimethylimidazolidin-2-ylidene) Phosphoramidate linkage
  modified_base order(2..10,11..22): mod_base = OTHER; note = Phosphorothioate linkage
  misc_feature 1..23: note = RM110766
tctgaggantgggttcatttttc

SEQ ID NO: 975 - DNA, 26 bp, synthetic construct
  source 1..26: mol_type = other DNA
  misc_feature 21..23: note = DNA
  misc_feature order(1..20,24..26): note = RNA
  modified_base 22: mod_base = OTHER; note = DNA nucleotide carrying a 6-amino-5-nitro-3-yl-2(1H)-pyridone nucleobase
  modified_base order(15,25): mod_base = OTHER; note = 2-Prime-Fluoro modified nucleoside
  modified_base order(1..14,16..20,24,26): mod_base = OTHER; note = 2-Prime-O-Methyl modified nucleoside
  modified_base order(1^2,23^24,25^26): mod_base = OTHER; note = (1,3-dimethylimidazolidin-2-ylidene) Phosphoramidate linkage
  modified_base order(2..23,24^25): mod_base = OTHER; note = Phosphorothioate linkage
  misc_feature 1..26: note = RM110767
attcggtcaaacctctgaggantggg

SEQ ID NO: 976 - DNA, 26 bp, synthetic construct
  source 1..26: mol_type = other DNA
  misc_feature 18..20: note = DNA
  misc_feature order(1..17,21..26): note = RNA
  modified_base 19: mod_base = OTHER; note = DNA nucleotide carrying a 6-amino-5-nitro-3-yl-2(1H)-pyridone nucleobase
  modified_base order(12,22): mod_base = OTHER; note = 2-Prime-Fluoro modified nucleoside
  modified_base order(1..11,13..17,21,23..26): mod_base = OTHER; note = 2-Prime-O-Methyl modified nucleoside
  modified_base order(1^2,20^21,25^26): mod_base = OTHER; note = (1,3-dimethylimidazolidin-2-ylidene) Phosphoramidate linkage
  modified_base order(2..20,21..25): mod_base = OTHER; note = Phosphorothioate linkage
  misc_feature 1..26: note = RM110768
cggtcaaacctctgaggantgggttc

SEQ ID NO: 977 - DNA, 26 bp, synthetic construct
  source 1..26: mol_type = other DNA
  misc_feature 15..17: note = DNA
  misc_feature order(1..14,18..26): note = RNA
  modified_base 16: mod_base = OTHER; note = DNA nucleotide carrying a 6-amino-5-nitro-3-yl-2(1H)-pyridone nucleobase
  modified_base order(9,19): mod_base = OTHER; note = 2-Prime-Fluoro modified nucleoside
  modified_base order(1..8,10..14,18,20..26): mod_base = OTHER; note = 2-Prime-O-Methyl modified nucleoside
  modified_base order(1^2,17^18,25^26): mod_base = OTHER; note = (1,3-dimethylimidazolidin-2-ylidene) Phosphoramidate linkage
  modified_base order(2..17,18..25): mod_base = OTHER; note = Phosphorothioate linkage
  misc_feature 1..26: note = RM110769
tcaaacctctgaggantgggttcatt

SEQ ID NO: 978 - DNA, 26 bp, synthetic construct
  source 1..26: mol_type = other DNA
  misc_feature 12..14: note = DNA
  misc_feature order(1..11,15..26): note = RNA
  modified_base 13: mod_base = OTHER; note = DNA nucleotide carrying a 6-amino-5-nitro-3-yl-2(1H)-pyridone nucleobase
  modified_base order(6,16): mod_base = OTHER; note = 2-Prime-Fluoro modified nucleoside
  modified_base order(1..5,7..11,15,17..26): mod_base = OTHER; note = 2-Prime-O-Methyl modified nucleoside
  modified_base order(1^2,14^15,25^26): mod_base = OTHER; note = (1,3-dimethylimidazolidin-2-ylidene) Phosphoramidate linkage
  modified_base order(2..14,15..25): mod_base = OTHER; note = Phosphorothioate linkage
  misc_feature 1..26: note = RM110770
aacctctgaggantgggttcattttt

SEQ ID NO: 979 - DNA, 26 bp, synthetic construct
  source 1..26: mol_type = other DNA
  misc_feature 9..11: note = DNA
  misc_feature order(1..8,12..26): note = RNA
  modified_base 10: mod_base = OTHER; note = DNA nucleotide carrying a 6-amino-5-nitro-3-yl-2(1H)-pyridone nucleobase
  modified_base order(3,13): mod_base = OTHER; note = 2-Prime-Fluoro modified nucleoside
  modified_base order(1..2,4..8,12,14..26): mod_base = OTHER; note = 2-Prime-O-Methyl modified nucleoside
  modified_base order(1^2,11^12,25^26): mod_base = OTHER; note = (1,3-dimethylimidazolidin-2-ylidene) Phosphoramidate linkage
  modified_base order(2..11,12..25): mod_base = OTHER; note = Phosphorothioate linkage
  misc_feature 1..26: note = RM110771
ctctgaggantgggttcatttttctt

SEQ ID NO: 980 - DNA, 29 bp, synthetic construct
  source 1..29: mol_type = other DNA
  misc_feature 23..25: note = DNA
  misc_feature order(1..22,26..29): note = RNA
  modified_base 24: mod_base = OTHER; note = DNA nucleotide carrying a 6-amino-5-nitro-3-yl-2(1H)-pyridone nucleobase
  modified_base order(17,27): mod_base = OTHER; note = 2-Prime-Fluoro modified nucleoside
  modified_base order(1..16,18..22,26,28..29): mod_base = OTHER; note = 2-Prime-O-Methyl modified nucleoside
  modified_base order(1^2,25^26,28^29): mod_base = OTHER; note = (1,3-dimethylimidazolidin-2-ylidene) Phosphoramidate linkage
  modified_base order(2..25,26..28): mod_base = OTHER; note = Phosphorothioate linkage
  misc_feature 1..29: note = RM110772
caattcggtcaaacctctgaggantgggt

SEQ ID NO: 981 - DNA, 29 bp, synthetic construct
  source 1..29: mol_type = other DNA
  misc_feature 20..22: note = DNA
  misc_feature order(1..19,23..29): note = RNA
  modified_base 21: mod_base = OTHER; note = DNA nucleotide carrying a 6-amino-5-nitro-3-yl-2(1H)-pyridone nucleobase
  modified_base order(14,24): mod_base = OTHER; note = 2-Prime-Fluoro modified nucleoside
  modified_base order(1..13,15..19,23,25..29): mod_base = OTHER; note = 2-Prime-O-Methyl modified nucleoside
  modified_base order(1^2,22^23,28^29): mod_base = OTHER; note = (1,3-dimethylimidazolidin-2-ylidene) Phosphoramidate linkage
  modified_base order(2..22,23..28): mod_base = OTHER; note = Phosphorothioate linkage
  misc_feature 1..29: note = RM110773
ttcggtcaaacctctgaggantgggttca

SEQ ID NO: 982 - DNA, 29 bp, synthetic construct
  source 1..29: mol_type = other DNA
  misc_feature 17..19: note = DNA
  misc_feature order(1..16,20..29): note = RNA
  modified_base 18: mod_base = OTHER; note = DNA nucleotide carrying a 6-amino-5-nitro-3-yl-2(1H)-pyridone nucleobase
  modified_base order(11,21): mod_base = OTHER; note = 2-Prime-Fluoro modified nucleoside
  modified_base order(1..10,12..16,20,22..29): mod_base = OTHER; note = 2-Prime-O-Methyl modified nucleoside
  modified_base order(1^2,19^20,28^29): mod_base = OTHER; note = (1,3-dimethylimidazolidin-2-ylidene) Phosphoramidate linkage
  modified_base order(2..19,20..28): mod_base = OTHER; note = Phosphorothioate linkage
  misc_feature 1..29: note = RM110774
ggtcaaacctctgaggantgggttcattt

SEQ ID NO: 983 - DNA, 29 bp, synthetic construct
  source 1..29: mol_type = other DNA
  misc_feature 14..16: note = DNA
  misc_feature order(1..13,17..29): note = RNA
  modified_base 15: mod_base = OTHER; note = DNA nucleotide carrying a 6-amino-5-nitro-3-yl-2(1H)-pyridone nucleobase
  modified_base order(8,18): mod_base = OTHER; note = 2-Prime-Fluoro modified nucleoside
  modified_base order(1..7,9..13,17,19..29): mod_base = OTHER; note = 2-Prime-O-Methyl modified nucleoside
  modified_base order(1^2,16^17,28^29): mod_base = OTHER; note = (1,3-dimethylimidazolidin-2-ylidene) Phosphoramidate linkage
  modified_base order(2..16,17..28): mod_base = OTHER; note = Phosphorothioate linkage
  misc_feature 1..29: note = RM110775
caaacctctgaggantgggttcatttttc

SEQ ID NO: 984 - DNA, 29 bp, synthetic construct
  source 1..29: mol_type = other DNA
  misc_feature 11..13: note = DNA
  misc_feature order(1..10,14..29): note = RNA
  modified_base 12: mod_base = OTHER; note = DNA nucleotide carrying a 6-amino-5-nitro-3-yl-2(1H)-pyridone nucleobase
  modified_base order(5,15): mod_base = OTHER; note = 2-Prime-Fluoro modified nucleoside
  modified_base order(1..4,6..10,14,16..29): mod_base = OTHER; note = 2-Prime-O-Methyl modified nucleoside
  modified_base order(1^2,13^14,28^29): mod_base = OTHER; note = (1,3-dimethylimidazolidin-2-ylidene) Phosphoramidate linkage
  modified_base order(2..13,14..28): mod_base = OTHER; note = Phosphorothioate linkage
  misc_feature 1..29: note = RM110776
acctctgaggantgggttcatttttcttg

SEQ ID NO: 985 - DNA, 29 bp, synthetic construct
  source 1..29: mol_type = other DNA
  misc_feature 8..10: note = DNA
  misc_feature order(1..7,11..29): note = RNA
  modified_base 9: mod_base = OTHER; note = DNA nucleotide carrying a 6-amino-5-nitro-3-yl-2(1H)-pyridone nucleobase
  modified_base order(2,12): mod_base = OTHER; note = 2-Prime-Fluoro modified nucleoside
  modified_base order(1,3..7,11,13..29): mod_base = OTHER; note = 2-Prime-O-Methyl modified nucleoside
  modified_base order(1^2,10^11,28^29): mod_base = OTHER; note = (1,3-dimethylimidazolidin-2-ylidene) Phosphoramidate linkage
  modified_base order(2..10,11..28): mod_base = OTHER; note = Phosphorothioate linkage
  misc_feature 1..29: note = RM110777
tctgaggantgggttcatttttcttgtct

SEQ ID NO: 986 - DNA, 29 bp, synthetic construct
  source 1..29: mol_type = other DNA
  misc_feature 17..19: note = DNA
  misc_feature order(1..16,20..29): note = RNA
  modified_base 18: mod_base = OTHER; note = DNA nucleotide carrying a 6-amino-5-nitro-3-yl-2(1H)-pyridone nucleobase
  modified_base order(4,6,10,13,21..23,27): mod_base = OTHER; note = 2-Prime-Fluoro modified nucleoside
  modified_base order(1..3,5,7..9,11..12,14..16,20,24..26,28..29): mod_base = OTHER; note = 2-Prime-O-Methyl modified nucleoside
  modified_base order(1^2,19^20,28^29): mod_base = OTHER; note = (1,3-dimethylimidazolidin-2-ylidene) Phosphoramidate linkage
  modified_base order(2..19,20..28): mod_base = OTHER; note = Phosphorothioate linkage
  misc_feature 1..29: note = RM110778
ggtcaaacctctgaggantgggttcattt

SEQ ID NO: 987 - DNA, 29 bp, synthetic construct
  source 1..29: mol_type = other DNA
  misc_feature 14..16: note = DNA
  misc_feature order(1..13,17..29): note = RNA
  modified_base 15: mod_base = OTHER; note = DNA nucleotide carrying a 6-amino-5-nitro-3-yl-2(1H)-pyridone nucleobase
  modified_base order(1,3,7,10,18..20,24): mod_base = OTHER; note = 2-Prime-Fluoro modified nucleoside
  modified_base order(2,4..6,8..9,11..13,17,21..23,25..29): mod_base = OTHER; note = 2-Prime-O-Methyl modified nucleoside
  modified_base order(1^2,16^17,28^29): mod_base = OTHER; note = (1,3-dimethylimidazolidin-2-ylidene) Phosphoramidate linkage
  modified_base order(2..16,17..28): mod_base = OTHER; note = Phosphorothioate linkage
  misc_feature 1..29: note = RM110779
caaacctctgaggantgggttcatttttc

SEQ ID NO: 988 - DNA, 29 bp, synthetic construct
  source 1..29: mol_type = other DNA
  misc_feature 11..13: note = DNA
  misc_feature order(1..10,14..29): note = RNA
  modified_base 12: mod_base = OTHER; note = DNA nucleotide carrying a 6-amino-5-nitro-3-yl-2(1H)-pyridone nucleobase
  modified_base order(5,9..10,15,19,22,26,28): mod_base = OTHER; note = 2-Prime-Fluoro modified nucleoside
  modified_base order(1..4,6..8,14,16..18,20..21,23..25,27,29): mod_base = OTHER; note = 2-Prime-O-Methyl modified nucleoside
  modified_base order(1^2,13^14,28^29): mod_base = OTHER; note = (1,3-dimethylimidazolidin-2-ylidene) Phosphoramidate linkage
  modified_base order(2..13,14..28): mod_base = OTHER; note = Phosphorothioate linkage
  misc_feature 1..29: note = RM110780
acctctgaggantgggttcatttttcttg

SEQ ID NO: 989 - DNA, 29 bp, synthetic construct
  source 1..29: mol_type = other DNA
  misc_feature 8..10: note = DNA
  misc_feature order(1..7,11..29): note = RNA
  modified_base 9: mod_base = OTHER; note = DNA nucleotide carrying a 6-amino-5-nitro-3-yl-2(1H)-pyridone nucleobase
  modified_base order(2,6..7,12,16,19,23,25): mod_base = OTHER; note = 2-Prime-Fluoro modified nucleoside
  modified_base order(1,3..5,11,13..15,17..18,20..22,24,26..29): mod_base = OTHER; note = 2-Prime-O-Methyl modified nucleoside
  modified_base order(1^2,10^11,28^29): mod_base = OTHER; note = (1,3-dimethylimidazolidin-2-ylidene) Phosphoramidate linkage
  modified_base order(2..10,11..28): mod_base = OTHER; note = Phosphorothioate linkage
  misc_feature 1..29: note = RM110781
tctgaggantgggttcatttttcttgtct

SEQ ID NO: 990 - DNA, 26 bp, synthetic construct
  source 1..26: mol_type = other DNA
  misc_feature 18..20: note = DNA
  misc_feature order(1..17,21..26): note = RNA
  modified_base 19: mod_base = OTHER; note = DNA nucleotide carrying a 6-amino-5-nitro-3-yl-2(1H)-pyridone nucleobase
  modified_base order(11,14,22..24): mod_base = OTHER; note = 2-Prime-Fluoro modified nucleoside
  modified_base order(1..10,12..13,15..17,21,25..26): mod_base = OTHER; note = 2-Prime-O-Methyl modified nucleoside
  modified_base order(1^2,20^21,25^26): mod_base = OTHER; note = (1,3-dimethylimidazolidin-2-ylidene) Phosphoramidate linkage
  modified_base order(2..20,21..25): mod_base = OTHER; note = Phosphorothioate linkage
  misc_feature 1..26: note = RM110782
cggtcaaacctctgaggantgggttc

SEQ ID NO: 991 - DNA, 26 bp, synthetic construct
  source 1..26: mol_type = other DNA
  misc_feature 15..17: note = DNA
  misc_feature order(1..14,18..26): note = RNA
  modified_base 16: mod_base = OTHER; note = DNA nucleotide carrying a 6-amino-5-nitro-3-yl-2(1H)-pyridone nucleobase
  modified_base order(8,11,19..21): mod_base = OTHER; note = 2-Prime-Fluoro modified nucleoside
  modified_base order(1..7,9..10,12..14,18,22..26): mod_base = OTHER; note = 2-Prime-O-Methyl modified nucleoside
  modified_base order(1^2,17^18,25^26): mod_base = OTHER; note = (1,3-dimethylimidazolidin-2-ylidene) Phosphoramidate linkage
  modified_base order(2..17,18..25): mod_base = OTHER; note = Phosphorothioate linkage
  misc_feature 1..26: note = RM110783
tcaaacctctgaggantgggttcatt

SEQ ID NO: 992 - DNA, 26 bp, synthetic construct
  source 1..26: mol_type = other DNA
  misc_feature 12..14: note = DNA
  misc_feature order(1..11,15..26): note = RNA
  modified_base 13: mod_base = OTHER; note = DNA nucleotide carrying a 6-amino-5-nitro-3-yl-2(1H)-pyridone nucleobase
  modified_base order(5,8,16..18): mod_base = OTHER; note = 2-Prime-Fluoro modified nucleoside
  modified_base order(1..4,6..7,9..11,15,19..26): mod_base = OTHER; note = 2-Prime-O-Methyl modified nucleoside
  modified_base order(1^2,14^15,25^26): mod_base = OTHER; note = (1,3-dimethylimidazolidin-2-ylidene) Phosphoramidate linkage
  modified_base order(2..14,15..25): mod_base = OTHER; note = Phosphorothioate linkage
  misc_feature 1..26: note = RM110784
aacctctgaggantgggttcattttt

SEQ ID NO: 993 - DNA, 26 bp, synthetic construct
  source 1..26: mol_type = other DNA
  misc_feature 9..11: note = DNA
  misc_feature order(1..8,12..26): note = RNA
  modified_base 10: mod_base = OTHER; note = DNA nucleotide carrying a 6-amino-5-nitro-3-yl-2(1H)-pyridone nucleobase
  modified_base order(2,5,13..15): mod_base = OTHER; note = 2-Prime-Fluoro modified nucleoside
  modified_base order(1,3..4,6..8,12,16..26): mod_base = OTHER; note = 2-Prime-O-Methyl modified nucleoside
  modified_base order(1^2,11^12,25^26): mod_base = OTHER; note = (1,3-dimethylimidazolidin-2-ylidene) Phosphoramidate linkage
  modified_base order(2..11,12..25): mod_base = OTHER; note = Phosphorothioate linkage
  misc_feature 1..26: note = RM110785
ctctgaggantgggttcatttttctt

SEQ ID NO: 994 - DNA, 29 bp, synthetic construct
  source 1..29: mol_type = other DNA
  misc_feature 23..25: note = DNA
  misc_feature order(1..22,26..29): note = RNA
  modified_base 24: mod_base = OTHER; note = DNA nucleotide carrying a 6-amino-5-nitro-3-yl-2(1H)-pyridone nucleobase
  modified_base order(16,19,27..29): mod_base = OTHER; note = 2-Prime-Fluoro modified nucleoside
  modified_base order(1..15,17..18,20..22,26): mod_base = OTHER; note = 2-Prime-O-Methyl modified nucleoside
  modified_base order(1^2,25^26,28^29): mod_base = OTHER; note = (1,3-dimethylimidazolidin-2-ylidene) Phosphoramidate linkage
  modified_base order(2..25,26..28): mod_base = OTHER; note = Phosphorothioate linkage
  misc_feature 1..29: note = RM110786
caattcggtcaaacctctgaggantgggt

SEQ ID NO: 995 - DNA, 29 bp, synthetic construct
  source 1..29: mol_type = other DNA
  misc_feature 20..22: note = DNA
  misc_feature order(1..19,23..29): note = RNA
  modified_base 21: mod_base = OTHER; note = DNA nucleotide carrying a 6-amino-5-nitro-3-yl-2(1H)-pyridone nucleobase
  modified_base order(13,16,24..26): mod_base = OTHER; note = 2-Prime-Fluoro modified nucleoside
  modified_base order(1..12,14..15,17..19,23,27..29): mod_base = OTHER; note = 2-Prime-O-Methyl modified nucleoside
  modified_base order(1^2,22^23,28^29): mod_base = OTHER; note = (1,3-dimethylimidazolidin-2-ylidene) Phosphoramidate linkage
  modified_base order(2..22,23..28): mod_base = OTHER; note = Phosphorothioate linkage
  misc_feature 1..29: note = RM110787
ttcggtcaaacctctgaggantgggttca

SEQ ID NO: 996 - DNA, 29 bp, synthetic construct
  source 1..29: mol_type = other DNA
  misc_feature 17..19: note = DNA
  misc_feature order(1..16,20..29): note = RNA
  modified_base 18: mod_base = OTHER; note = DNA nucleotide carrying a 6-amino-5-nitro-3-yl-2(1H)-pyridone nucleobase
  modified_base order(10,13,21..23): mod_base = OTHER; note = 2-Prime-Fluoro modified nucleoside
  modified_base order(1..9,11..12,14..16,20,24..29): mod_base = OTHER; note = 2-Prime-O-Methyl modified nucleoside
  modified_base order(1^2,19^20,28^29): mod_base = OTHER; note = (1,3-dimethylimidazolidin-2-ylidene) Phosphoramidate linkage
  modified_base order(2..19,20..28): mod_base = OTHER; note = Phosphorothioate linkage
  misc_feature 1..29: note = RM110788
ggtcaaacctctgaggantgggttcattt

SEQ ID NO: 997 - DNA, 29 bp, synthetic construct
  source 1..29: mol_type = other DNA
  misc_feature 14..16: note = DNA
  misc_feature order(1..13,17..29): note = RNA
  modified_base 15: mod_base = OTHER; note = DNA nucleotide carrying a 6-amino-5-nitro-3-yl-2(1H)-pyridone nucleobase
  modified_base order(7,10,18..20): mod_base = OTHER; note = 2-Prime-Fluoro modified nucleoside
  modified_base order(1..6,8..9,11..13,17,21..29): mod_base = OTHER; note = 2-Prime-O-Methyl modified nucleoside
  modified_base order(1^2,16^17,28^29): mod_base = OTHER; note = (1,3-dimethylimidazolidin-2-ylidene) Phosphoramidate linkage
  modified_base order(2..16,17..28): mod_base = OTHER; note = Phosphorothioate linkage
  misc_feature 1..29: note = RM110789
caaacctctgaggantgggttcatttttc

SEQ ID NO: 998 - DNA, 29 bp, synthetic construct
  source 1..29: mol_type = other DNA
  misc_feature 11..13: note = DNA
  misc_feature order(1..10,14..29): note = RNA
  modified_base 12: mod_base = OTHER; note = DNA nucleotide carrying a 6-amino-5-nitro-3-yl-2(1H)-pyridone nucleobase
  modified_base order(4,7,15..17): mod_base = OTHER; note = 2-Prime-Fluoro modified nucleoside
  modified_base order(1..3,5..6,8..10,14,18..29): mod_base = OTHER; note = 2-Prime-O-Methyl modified nucleoside
  modified_base order(1^2,13^14,28^29): mod_base = OTHER; note = (1,3-dimethylimidazolidin-2-ylidene) Phosphoramidate linkage
  modified_base order(2..13,14..28): mod_base = OTHER; note = Phosphorothioate linkage
  misc_feature 1..29: note = RM110790
acctctgaggantgggttcatttttcttg

SEQ ID NO: 999 - DNA, 29 bp, synthetic construct
  source 1..29: mol_type = other DNA
  misc_feature 8..10: note = DNA
  misc_feature order(1..7,11..29): note = RNA
  modified_base 9: mod_base = OTHER; note = DNA nucleotide carrying a 6-amino-5-nitro-3-yl-2(1H)-pyridone nucleobase
  modified_base order(1,4,12..14): mod_base = OTHER; note = 2-Prime-Fluoro modified nucleoside
  modified_base order(2..3,5..7,11,15..29): mod_base = OTHER; note = 2-Prime-O-Methyl modified nucleoside
  modified_base order(1^2,10^11,28^29): mod_base = OTHER; note = (1,3-dimethylimidazolidin-2-ylidene) Phosphoramidate linkage
  modified_base order(2..10,11..28): mod_base = OTHER; note = Phosphorothioate linkage
  misc_feature 1..29: note = RM110791
tctgaggantgggttcatttttcttgtct

SEQ ID NO: 1000 - DNA, 26 bp, synthetic construct
  source 1..26: mol_type = other DNA
  misc_feature 15..17: note = DNA
  misc_feature order(1..14,18..26): note = RNA
  modified_base 16: mod_base = OTHER; note = DNA nucleotide carrying a 6-amino-5-nitro-3-yl-2(1H)-pyridone nucleobase
  modified_base order(13..14,19,23,26): mod_base = OTHER; note = 2-Prime-Fluoro modified nucleoside
  modified_base order(1..12,18,20..22,24..25): mod_base = OTHER; note = 2-Prime-O-Methyl modified nucleoside
  modified_base order(1^2,17^18,25^26): mod_base = OTHER; note = (1,3-dimethylimidazolidin-2-ylidene) Phosphoramidate linkage
  modified_base order(2..17,18..25): mod_base = OTHER; note = Phosphorothioate linkage
  misc_feature 1..26: note = RM110792
tcaaacctctgaggantgggttcatt

SEQ ID NO: 1001 - DNA, 26 bp, synthetic construct
  source 1..26: mol_type = other DNA
  misc_feature 12..14: note = DNA
  misc_feature order(1..11,15..26): note = RNA
  modified_base 13: mod_base = OTHER; note = DNA nucleotide carrying a 6-amino-5-nitro-3-yl-2(1H)-pyridone nucleobase
  modified_base order(10..11,16,20,23): mod_base = OTHER; note = 2-Prime-Fluoro modified nucleoside
  modified_base order(1..9,15,17..19,21..22,24..26): mod_base = OTHER; note = 2-Prime-O-Methyl modified nucleoside
  modified_base order(1^2,14^15,25^26): mod_base = OTHER; note = (1,3-dimethylimidazolidin-2-ylidene) Phosphoramidate linkage
  modified_base order(2..14,15..25): mod_base = OTHER; note = Phosphorothioate linkage
  misc_feature 1..26: note = RM110793
aacctctgaggantgggttcattttt

SEQ ID NO: 1002 - DNA, 26 bp, synthetic construct
  source 1..26: mol_type = other DNA
  misc_feature 9..11: note = DNA
  misc_feature order(1..8,12..26): note = RNA
  modified_base 10: mod_base = OTHER; note = DNA nucleotide carrying a 6-amino-5-nitro-3-yl-2(1H)-pyridone nucleobase
  modified_base order(7..8,13,17,20): mod_base = OTHER; note = 2-Prime-Fluoro modified nucleoside
  modified_base order(1..6,12,14..16,18..19,21..26): mod_base = OTHER; note = 2-Prime-O-Methyl modified nucleoside
  modified_base order(1^2,11^12,25^26): mod_base = OTHER; note = (1,3-dimethylimidazolidin-2-ylidene) Phosphoramidate linkage
  modified_base order(2..11,12..25): mod_base = OTHER; note = Phosphorothioate linkage
  misc_feature 1..26: note = RM110794
ctctgaggantgggttcatttttctt

SEQ ID NO: 1003 - DNA, 26 bp, synthetic construct
  source 1..26: mol_type = other DNA
  misc_feature 6..8: note = DNA
  misc_feature order(1..5,9..26): note = RNA
  modified_base 7: mod_base = OTHER; note = DNA nucleotide carrying a 6-amino-5-nitro-3-yl-2(1H)-pyridone nucleobase
  modified_base order(4..5,10,14,17): mod_base = OTHER; note = 2-Prime-Fluoro modified nucleoside
  modified_base order(1..3,9,11..13,15..16,18..26): mod_base = OTHER; note = 2-Prime-O-Methyl modified nucleoside
  modified_base order(1^2,8^9,25^26): mod_base = OTHER; note = (1,3-dimethylimidazolidin-2-ylidene) Phosphoramidate linkage
  modified_base order(2..8,9..25): mod_base = OTHER; note = Phosphorothioate linkage
  misc_feature 1..26: note = RM110795
tgaggantgggttcatttttcttgtc

SEQ ID NO: 1004 - DNA, 29 bp, synthetic construct
  source 1..29: mol_type = other DNA
  misc_feature 17..19: note = DNA
  misc_feature order(1..16,20..29): note = RNA
  modified_base 18: mod_base = OTHER; note = DNA nucleotide carrying a 6-amino-5-nitro-3-yl-2(1H)-pyridone nucleobase
  modified_base order(15..16,21,25,28): mod_base = OTHER; note = 2-Prime-Fluoro modified nucleoside
  modified_base order(1..14,20,22..24,26..27,29): mod_base = OTHER; note = 2-Prime-O-Methyl modified nucleoside
  modified_base order(1^2,19^20,28^29): mod_base = OTHER; note = (1,3-dimethylimidazolidin-2-ylidene) Phosphoramidate linkage
  modified_base order(2..19,20..28): mod_base = OTHER; note = Phosphorothioate linkage
  misc_feature 1..29: note = RM110796
ggtcaaacctctgaggantgggttcattt

SEQ ID NO: 1005 - DNA, 29 bp, synthetic construct
  source 1..29: mol_type = other DNA
  misc_feature 14..16: note = DNA
  misc_feature order(1..13,17..29): note = RNA
  modified_base 15: mod_base = OTHER; note = DNA nucleotide carrying a 6-amino-5-nitro-3-yl-2(1H)-pyridone nucleobase
  modified_base order(12..13,18,22,25): mod_base = OTHER; note = 2-Prime-Fluoro modified nucleoside
  modified_base order(1..11,17,19..21,23..24,26..29): mod_base = OTHER; note = 2-Prime-O-Methyl modified nucleoside
  modified_base order(1^2,16^17,28^29): mod_base = OTHER; note = (1,3-dimethylimidazolidin-2-ylidene) Phosphoramidate linkage
  modified_base order(2..16,17..28): mod_base = OTHER; note = Phosphorothioate linkage
  misc_feature 1..29: note = RM110797
caaacctctgaggantgggttcatttttc

SEQ ID NO: 1006 - DNA, 29 bp, synthetic construct
  source 1..29: mol_type = other DNA
  misc_feature 11..13: note = DNA
  misc_feature order(1..10,14..29): note = RNA
  modified_base 12: mod_base = OTHER; note = DNA nucleotide carrying a 6-amino-5-nitro-3-yl-2(1H)-pyridone nucleobase
  modified_base order(9..10,15,19,22): mod_base = OTHER; note = 2-Prime-Fluoro modified nucleoside
  modified_base order(1..8,14,16..18,20..21,23..29): mod_base = OTHER; note = 2-Prime-O-Methyl modified nucleoside
  modified_base order(1^2,13^14,28^29): mod_base = OTHER; note = (1,3-dimethylimidazolidin-2-ylidene) Phosphoramidate linkage
  modified_base order(2..13,14..28): mod_base = OTHER; note = Phosphorothioate linkage
  misc_feature 1..29: note = RM110798
acctctgaggantgggttcatttttcttg

SEQ ID NO: 1007 - DNA, 29 bp, synthetic construct
  source 1..29: mol_type = other DNA
  misc_feature 8..10: note = DNA
  misc_feature order(1..7,11..29): note = RNA
  modified_base 9: mod_base = OTHER; note = DNA nucleotide carrying a 6-amino-5-nitro-3-yl-2(1H)-pyridone nucleobase
  modified_base order(6..7,12,16,19): mod_base = OTHER; note = 2-Prime-Fluoro modified nucleoside
  modified_base order(1..5,11,13..15,17..18,20..29): mod_base = OTHER; note = 2-Prime-O-Methyl modified nucleoside
  modified_base order(1^2,10^11,28^29): mod_base = OTHER; note = (1,3-dimethylimidazolidin-2-ylidene) Phosphoramidate linkage
  modified_base order(2..10,11..28): mod_base = OTHER; note = Phosphorothioate linkage
  misc_feature 1..29: note = RM110799
tctgaggantgggttcatttttcttgtct

SEQ ID NO: 1008 - DNA, 29 bp, synthetic construct
  source 1..29: mol_type = other DNA
  misc_feature 5..7: note = DNA
  misc_feature order(1..4,8..29): note = RNA
  modified_base 6: mod_base = OTHER; note = DNA nucleotide carrying a 6-amino-5-nitro-3-yl-2(1H)-pyridone nucleobase
  modified_base order(3..4,9,13,16): mod_base = OTHER; note = 2-Prime-Fluoro modified nucleoside
  modified_base order(1..2,8,10..12,14..15,17..29): mod_base = OTHER; note = 2-Prime-O-Methyl modified nucleoside
  modified_base order(1^2,7^8,28^29): mod_base = OTHER; note = (1,3-dimethylimidazolidin-2-ylidene) Phosphoramidate linkage
  modified_base order(2..7,8..28): mod_base = OTHER; note = Phosphorothioate linkage
  misc_feature 1..29: note = RM110800
gaggantgggttcatttttcttgtctctt

SEQ ID NO: 1009 - DNA, 38 bp, synthetic construct
  source 1..38: mol_type = other DNA
  misc_feature 19..20: note = DNA
  misc_feature order(1..18,21..38): note = RNA
  modified_base 18: mod_base = OTHER; note = 2-Prime-O-Methoxyethyl modified nucleoside
  modified_base 19: mod_base = OTHER; note = DNA nucleotide carrying a 6-amino-5-nitro-3-yl-2(1H)-pyridone nucleobase
  modified_base order(13,15,22,24,29..30): mod_base = OTHER; note = 2-Prime-Fluoro modified nucleoside
  modified_base order(1..12,14,16..17,21,23,25..28,31..38): mod_base = OTHER; note = 2-Prime-O-Methyl modified nucleoside
  modified_base order(1^2,37^38): mod_base = OTHER; note = (1,3-dimethylimidazolidin-2-ylidene) Phosphoramidate linkage
  modified_base order(2..20,21..37): mod_base = OTHER; note = Phosphorothioate linkage
  modified_base 20^21: mod_base = OTHER; note = Methylphosphonate linkage
  misc_feature 1..38: note = RM110801
cggtcaaacctctgaggantgggttcatttttcttgtc

SEQ ID NO: 1010 - DNA, 38 bp, synthetic construct
  source 1..38: mol_type = other DNA
  misc_feature 25..26: note = DNA
  misc_feature order(1..24,27..38): note = RNA
  modified_base 24: mod_base = OTHER; note = 2-Prime-O-Methoxyethyl modified nucleoside
  modified_base 25: mod_base = OTHER; note = DNA nucleotide carrying a 6-amino-5-nitro-3-yl-2(1H)-pyridone nucleobase
  modified_base order(16,28,31): mod_base = OTHER; note = 2-Prime-Fluoro modified nucleoside
  modified_base order(1..15,17..23,27,29..30,32..38): mod_base = OTHER; note = 2-Prime-O-Methyl modified nucleoside
  modified_base order(1^2,37^38): mod_base = OTHER; note = (1,3-dimethylimidazolidin-2-ylidene) Phosphoramidate linkage
  modified_base order(2..26,27..37): mod_base = OTHER; note = Phosphorothioate linkage
  modified_base 26^27: mod_base = OTHER; note = Methylphosphonate linkage
  misc_feature 1..38: note = RM110802
gcaattcggtcaaacctctgaggantgggttcattttt

SEQ ID NO: 1011 - DNA, 38 bp, synthetic construct
  source 1..38: mol_type = other DNA
  misc_feature 28..29: note = DNA
  misc_feature order(1..27,30..38): note = RNA
  modified_base 27: mod_base = OTHER; note = 2-Prime-O-Methoxyethyl modified nucleoside
  modified_base 28: mod_base = OTHER; note = DNA nucleotide carrying a 6-amino-5-nitro-3-yl-2(1H)-pyridone nucleobase
  modified_base order(22..23,31): mod_base = OTHER; note = 2-Prime-Fluoro modified nucleoside
  modified_base order(1..21,24..26,30,32..38): mod_base = OTHER; note = 2-Prime-O-Methyl modified nucleoside
  modified_base order(1^2,37^38): mod_base = OTHER; note = (1,3-dimethylimidazolidin-2-ylidene) Phosphoramidate linkage
  modified_base order(2..29,30..37): mod_base = OTHER; note = Phosphorothioate linkage
  modified_base 29^30: mod_base = OTHER; note = Methylphosphonate linkage
  misc_feature 1..38: note = RM110803
tgtgcaattcggtcaaacctctgaggantgggttcatt

SEQ ID NO: 1012 - DNA, 38 bp, synthetic construct
  source 1..38: mol_type = other DNA
  misc_feature 16..17: note = DNA
  misc_feature order(1..15,18..38): note = RNA
  modified_base 15: mod_base = OTHER; note = 2-Prime-O-Methoxyethyl modified nucleoside
  modified_base 16: mod_base = OTHER; note = DNA nucleotide carrying a 6-amino-5-nitro-3-yl-2(1H)-pyridone nucleobase
  modified_base order(8..10,13,19..20): mod_base = OTHER; note = 2-Prime-Fluoro modified nucleoside
  modified_base order(1..7,11..12,14,18,21..38): mod_base = OTHER; note = 2-Prime-O-Methyl modified nucleoside
  modified_base order(1^2,37^38): mod_base = OTHER; note = (1,3-dimethylimidazolidin-2-ylidene) Phosphoramidate linkage
  modified_base order(2..17,18..37): mod_base = OTHER; note = Phosphorothioate linkage
  modified_base 17^18: mod_base = OTHER; note = Methylphosphonate linkage
  misc_feature 1..38: note = RM110804
tcaaacctctgaggantgggttcatttttcttgtctct

SEQ ID NO: 1013 - DNA, 38 bp, synthetic construct
  source 1..38: mol_type = other DNA
  misc_feature 13..14: note = DNA
  misc_feature order(1..12,15..38): note = RNA
  modified_base 12: mod_base = OTHER; note = 2-Prime-O-Methoxyethyl modified nucleoside
  modified_base 13: mod_base = OTHER; note = DNA nucleotide carrying a 6-amino-5-nitro-3-yl-2(1H)-pyridone nucleobase
  modified_base order(11,16..17,19,23..24): mod_base = OTHER; note = 2-Prime-Fluoro modified nucleoside
  modified_base order(1..10,15,18,20..22,25..38): mod_base = OTHER; note = 2-Prime-O-Methyl modified nucleoside
  modified_base order(1^2,37^38): mod_base = OTHER; note = (1,3-dimethylimidazolidin-2-ylidene) Phosphoramidate linkage
  modified_base order(2..14,15..37): mod_base = OTHER; note = Phosphorothioate linkage
  modified_base 14^15: mod_base = OTHER; note = Methylphosphonate linkage
  misc_feature 1..38: note = RM110805
aacctctgaggantgggttcatttttcttgtctcttga

SEQ ID NO: 1014 - DNA, 38 bp, synthetic construct; identical to SEQ ID NO: 1010
  source 1..38: mol_type = other DNA
  misc_feature 25..26: note = DNA
  misc_feature order(1..24,27..38): note = RNA
  modified_base 24: mod_base = OTHER; note = 2-Prime-O-Methoxyethyl modified nucleoside
  modified_base 25: mod_base = OTHER; note = DNA nucleotide carrying a 6-amino-5-nitro-3-yl-2(1H)-pyridone nucleobase
  modified_base order(7,9,13,15..16,28,35..37): mod_base = OTHER; note = 2-Prime-Fluoro modified nucleoside
  modified_base order(1..6,8,10..12,14,17..23,27,29..34,38): mod_base = OTHER; note = 2-Prime-O-Methyl modified nucleoside
  modified_base order(1^2,37^38): mod_base = OTHER; note = (1,3-dimethylimidazolidin-2-ylidene) Phosphoramidate linkage
  modified_base order(2..26,27..37): mod_base = OTHER; note = Phosphorothioate linkage
  modified_base 26^27: mod_base = OTHER; note = Methylphosphonate linkage
  misc_feature 1..38: note = RM110806

SEQ ID NO: 1015 - DNA, 38 bp, synthetic construct; identical to SEQ ID NO: 1011
  source 1..38: mol_type = other DNA
  misc_feature 28..29: note = DNA
  misc_feature order(1..27,30..38): note = RNA
  modified_base 27: mod_base = OTHER; note = 2-Prime-O-Methoxyethyl modified nucleoside
  modified_base 28: mod_base = OTHER; note = DNA nucleotide carrying a 6-amino-5-nitro-3-yl-2(1H)-pyridone nucleobase
  modified_base order(24,31..32): mod_base = OTHER; note = 2-Prime-Fluoro modified nucleoside
  modified_base order(1..23,25..26,30,33..38): mod_base = OTHER; note = 2-Prime-O-Methyl modified nucleoside
  modified_base order(1^2,37^38): mod_base = OTHER; note = (1,3-dimethylimidazolidin-2-ylidene) Phosphoramidate linkage
  modified_base order(2..29,30..37): mod_base = OTHER; note = Phosphorothioate linkage
  modified_base 29^30: mod_base = OTHER; note = Methylphosphonate linkage
  misc_feature 1..38: note = RM110807

SEQ ID NO: 1016 - DNA, 38 bp, synthetic construct; identical to SEQ ID NO: 1010
  source 1..38: mol_type = other DNA
  misc_feature 25..26: note = DNA
  misc_feature order(1..24,27..38): note = RNA
  modified_base 24: mod_base = OTHER; note = 2-Prime-O-Methoxyethyl modified nucleoside
  modified_base 25: mod_base = OTHER; note = DNA nucleotide carrying a 6-amino-5-nitro-3-yl-2(1H)-pyridone nucleobase
  modified_base order(13,15..16,28,31,33): mod_base = OTHER; note = 2-Prime-Fluoro modified nucleoside
  modified_base order(1..12,14,17..23,27,29..30,32,34..38): mod_base = OTHER; note = 2-Prime-O-Methyl modified nucleoside
  modified_base order(1^2,37^38): mod_base = OTHER; note = (1,3-dimethylimidazolidin-2-ylidene) Phosphoramidate linkage
  modified_base order(2..26,27..37): mod_base = OTHER; note = Phosphorothioate linkage
  modified_base 26^27: mod_base = OTHER; note = Methylphosphonate linkage
  misc_feature 1..38: note = RM110808

SEQ ID NO: 1017 - DNA, 38 bp, synthetic construct
  source 1..38: mol_type = other DNA
  misc_feature 22..23: note = DNA
  misc_feature order(1..21,24..38): note = RNA
  modified_base 21: mod_base = OTHER; note = 2-Prime-O-Methoxyethyl modified nucleoside
  modified_base 22: mod_base = OTHER; note = DNA nucleotide carrying a 6-amino-5-nitro-3-yl-2(1H)-pyridone nucleobase
  modified_base order(14..16,19,25..26): mod_base = OTHER; note = 2-Prime-Fluoro modified nucleoside
  modified_base order(1..13,17..18,20,24,27..38): mod_base = OTHER; note = 2-Prime-O-Methyl modified nucleoside
  modified_base order(1^2,37^38): mod_base = OTHER; note = (1,3-dimethylimidazolidin-2-ylidene) Phosphoramidate linkage
  modified_base order(2..23,24..37): mod_base = OTHER; note = Phosphorothioate linkage
  modified_base 23^24: mod_base = OTHER; note = Methylphosphonate linkage
  misc_feature 1..38: note = RM110809
attcggtcaaacctctgaggantgggttcatttttctt

SEQ ID NO: 1018 - DNA, 38 bp, synthetic construct; identical to SEQ ID NO: 1009
  source 1..38: mol_type = other DNA
  misc_feature 19..20: note = DNA
  misc_feature order(1..18,21..38): note = RNA
  modified_base 18: mod_base = OTHER; note = 2-Prime-O-Methoxyethyl modified nucleoside
  modified_base 19: mod_base = OTHER; note = DNA nucleotide carrying a 6-amino-5-nitro-3-yl-2(1H)-pyridone nucleobase
  modified_base order(14,16,22..23,25,28): mod_base = OTHER; note = 2-Prime-Fluoro modified nucleoside
  modified_base order(1..13,15,17,21,24,26..27,29..38): mod_base = OTHER; note = 2-Prime-O-Methyl modified nucleoside
  modified_base order(1^2,37^38): mod_base = OTHER; note = (1,3-dimethylimidazolidin-2-ylidene) Phosphoramidate linkage
  modified_base order(2..20,21..37): mod_base = OTHER; note = Phosphorothioate linkage
  modified_base 20^21: mod_base = OTHER; note = Methylphosphonate linkage
  misc_feature 1..38: note = RM110810

SEQ ID NO: 1019 - DNA, 38 bp, synthetic construct; identical to SEQ ID NO: 1010
  source 1..38: mol_type = other DNA
  misc_feature 25..26: note = DNA
  misc_feature order(1..24,27..38): note = RNA
  modified_base 24: mod_base = OTHER; note = 2-Prime-O-Methoxyethyl modified nucleoside
  modified_base 25: mod_base = OTHER; note = DNA nucleotide carrying a 6-amino-5-nitro-3-yl-2(1H)-pyridone nucleobase
  modified_base order(20,22..23,28..30): mod_base = OTHER; note = 2-Prime-Fluoro modified nucleoside
  modified_base order(1..19,21,27,31..38): mod_base = OTHER; note = 2-Prime-O-Methyl modified nucleoside
  modified_base order(1^2,37^38): mod_base = OTHER; note = (1,3-dimethylimidazolidin-2-ylidene) Phosphoramidate linkage
  modified_base order(2..26,27..37): mod_base = OTHER; note = Phosphorothioate linkage
  modified_base 26^27: mod_base = OTHER; note = Methylphosphonate linkage
  misc_feature 1..38: note = RM110811

SEQ ID NO: 1020 - DNA, 38 bp, synthetic construct; identical to SEQ ID NO: 1010
  source 1..38: mol_type = other DNA
  misc_feature 25..26: note = DNA
  misc_feature order(1..24,27..38): note = RNA
  modified_base 24: mod_base = OTHER; note = 2-Prime-O-Methoxyethyl modified nucleoside
  modified_base 25: mod_base = OTHER; note = DNA nucleotide carrying a 6-amino-5-nitro-3-yl-2(1H)-pyridone nucleobase
  modified_base order(21,23,28): mod_base = OTHER; note = 2-Prime-Fluoro modified nucleoside
  modified_base order(1..20,22,27,29..38): mod_base = OTHER; note = 2-Prime-O-Methyl modified nucleoside
  modified_base order(1^2,37^38): mod_base = OTHER; note = (1,3-dimethylimidazolidin-2-ylidene) Phosphoramidate linkage
  modified_base order(2..26,27..37): mod_base = OTHER; note = Phosphorothioate linkage
  modified_base 26^27: mod_base = OTHER; note = Methylphosphonate linkage
  misc_feature 1..38: note = RM110812

SEQ ID NO: 1021 - DNA, 38 bp, synthetic construct; identical to SEQ ID NO: 1013
  source 1..38: mol_type = other DNA
  misc_feature 13..14: note = DNA
  misc_feature order(1..12,15..38): note = RNA
  modified_base 12: mod_base = OTHER; note = 2-Prime-O-Methoxyethyl modified nucleoside
  modified_base 13: mod_base = OTHER; note = DNA nucleotide carrying a 6-amino-5-nitro-3-yl-2(1H)-pyridone nucleobase
  modified_base order(5..6,11,16,18..19,21,24,29): mod_base = OTHER; note = 2-Prime-Fluoro modified nucleoside
  modified_base order(1..4,7..10,15,17,20,22..23,25..28,30..38): mod_base = OTHER; note = 2-Prime-O-Methyl modified nucleoside
  modified_base order(1^2,37^38): mod_base = OTHER; note = (1,3-dimethylimidazolidin-2-ylidene) Phosphoramidate linkage
  modified_base order(2..14,15..37): mod_base = OTHER; note = Phosphorothioate linkage
  modified_base 14^15: mod_base = OTHER; note = Methylphosphonate linkage
  misc_feature 1..38: note = RM110813

SEQ ID NO: 1022 - DNA, 38 bp, synthetic construct; identical to SEQ ID NO: 1013
  source 1..38: mol_type = other DNA
  misc_feature 13..14: note = DNA
  misc_feature order(1..12,15..38): note = RNA
  modified_base 12: mod_base = OTHER; note = 2-Prime-O-Methoxyethyl modified nucleoside
  modified_base 13: mod_base = OTHER; note = DNA nucleotide carrying a 6-amino-5-nitro-3-yl-2(1H)-pyridone nucleobase
  modified_base order(9,16,24): mod_base = OTHER; note = 2-Prime-Fluoro modified nucleoside
  modified_base order(1..8,10..11,15,17..23,25..38): mod_base = OTHER; note = 2-Prime-O-Methyl modified nucleoside
  modified_base order(1^2,37^38): mod_base = OTHER; note = (1,3-dimethylimidazolidin-2-ylidene) Phosphoramidate linkage
  modified_base order(2..14,15..37): mod_base = OTHER; note = Phosphorothioate linkage
  modified_base 14^15: mod_base = OTHER; note = Methylphosphonate linkage
  misc_feature 1..38: note = RM110814

SEQ ID NO: 1023 - DNA, 38 bp, synthetic construct; identical to SEQ ID NO: 1013
  source 1..38: mol_type = other DNA
  misc_feature 13..14: note = DNA
  misc_feature order(1..12,15..38): note = RNA
  modified_base 12: mod_base = OTHER; note = 2-Prime-O-Methoxyethyl modified nucleoside
  modified_base 13: mod_base = OTHER; note = DNA nucleotide carrying a 6-amino-5-nitro-3-yl-2(1H)-pyridone nucleobase
  modified_base order(1,6..7,9,16,18): mod_base = OTHER; note = 2-Prime-Fluoro modified nucleoside
  modified_base order(2..5,8,10..11,15,17,19..38): mod_base = OTHER; note = 2-Prime-O-Methyl modified nucleoside
  modified_base order(1^2,37^38): mod_base = OTHER; note = (1,3-dimethylimidazolidin-2-ylidene) Phosphoramidate linkage
  modified_base order(2..14,15..37): mod_base = OTHER; note = Phosphorothioate linkage
  modified_base 14^15: mod_base = OTHER; note = Methylphosphonate linkage
  misc_feature 1..38: note = RM110815

SEQ ID NO: 1024 - DNA, 20 bp, synthetic construct
  source 1..20: mol_type = other DNA
  misc_feature 9..10: note = DNA
  misc_feature order(1..8,11..20): note = RNA
  modified_base 8: mod_base = OTHER; note = 2-Prime-O-Methoxyethyl modified nucleoside
  modified_base 9: mod_base = OTHER; note = DNA nucleotide carrying a 6-amino-5-nitro-3-yl-2(1H)-pyridone nucleobase
  modified_base order(3..4,12,14): mod_base = OTHER; note = 2-Prime-Fluoro modified nucleoside
  modified_base order(1..2,5..7,11,13,15..20): mod_base = OTHER; note = 2-Prime-O-Methyl modified nucleoside
  modified_base order(1^2,19^20): mod_base = OTHER; note = (1,3-dimethylimidazolidin-2-ylidene) Phosphoramidate linkage
  modified_base order(2..10,11..19): mod_base = OTHER; note = Phosphorothioate linkage
  modified_base 10^11: mod_base = OTHER; note = Methylphosphonate linkage
  misc_feature 1..20: note = RM110816
tctgaggantgggttcattt

SEQ ID NO: 1025 - DNA, 20 bp, synthetic construct
  source 1..20: mol_type = other DNA
  misc_feature 12..13: note = DNA
  misc_feature order(1..11,14..20): note = RNA
  modified_base 11: mod_base = OTHER; note = 2-Prime-O-Methoxyethyl modified nucleoside
  modified_base 12: mod_base = OTHER; note = DNA nucleotide carrying a 6-amino-5-nitro-3-yl-2(1H)-pyridone nucleobase
  modified_base order(5,8,10,15,17,19): mod_base = OTHER; note = 2-Prime-Fluoro modified nucleoside
  modified_base order(1..4,6..7,9,14,16,18,20): mod_base = OTHER; note = 2-Prime-O-Methyl modified nucleoside
  modified_base order(1^2,19^20): mod_base = OTHER; note = (1,3-dimethylimidazolidin-2-ylidene) Phosphoramidate linkage
  modified_base order(2..13,14..19): mod_base = OTHER; note = Phosphorothioate linkage
  modified_base 13^14: mod_base = OTHER; note = Methylphosphonate linkage
  misc_feature 1..20: note = RM110817
acctctgaggantgggttca

SEQ ID NO: 1026 - DNA, 20 bp, synthetic construct
  source 1..20: mol_type = other DNA
  misc_feature 6..7: note = DNA
  misc_feature order(1..5,8..20): note = RNA
  modified_base 5: mod_base = OTHER; note = 2-Prime-O-Methoxyethyl modified nucleoside
  modified_base 6: mod_base = OTHER; note = DNA nucleotide carrying a 6-amino-5-nitro-3-yl-2(1H)-pyridone nucleobase
  modified_base order(9..10,20): mod_base = OTHER; note = 2-Prime-Fluoro modified nucleoside
  modified_base order(1..4,8,11..19): mod_base = OTHER; note = 2-Prime-O-Methyl modified nucleoside
  modified_base order(1^2,19^20): mod_base = OTHER; note = (1,3-dimethylimidazolidin-2-ylidene) Phosphoramidate linkage
  modified_base order(2..7,8..19): mod_base = OTHER; note = Phosphorothioate linkage
  modified_base 7^8: mod_base = OTHER; note = Methylphosphonate linkage
  misc_feature 1..20: note = RM110818
gaggantgggttcatttttc

SEQ ID NO: 1027 - DNA, 20 bp, synthetic construct
  source 1..20: mol_type = other DNA
  misc_feature 15..16: note = DNA
  misc_feature order(1..14,17..20): note = RNA
  modified_base 14: mod_base = OTHER; note = 2-Prime-O-Methoxyethyl modified nucleoside
  modified_base 15: mod_base = OTHER; note = DNA nucleotide carrying a 6-amino-5-nitro-3-yl-2(1H)-pyridone nucleobase
  modified_base order(1,3,18): mod_base = OTHER; note = 2-Prime-Fluoro modified nucleoside
  modified_base order(2,4..13,17,19..20): mod_base = OTHER; note = 2-Prime-O-Methyl modified nucleoside
  modified_base order(1^2,19^20): mod_base = OTHER; note = (1,3-dimethylimidazolidin-2-ylidene) Phosphoramidate linkage
  modified_base order(2..16,17..19): mod_base = OTHER; note = Phosphorothioate linkage
  modified_base 16^17: mod_base = OTHER; note = Methylphosphonate linkage
  misc_feature 1..20: note = RM110819
caaacctctgaggantgggt

SEQ ID NO: 1028 - DNA, 20 bp, synthetic construct
  source 1..20: mol_type = other DNA
  misc_feature 9..10: note = DNA
  misc_feature order(1..8,11..20): note = RNA
  modified_base 8: mod_base = OTHER; note = 2-Prime-O-Methoxyethyl modified nucleoside
  modified_base 9: mod_base = OTHER; note = DNA nucleotide carrying a 6-amino-5-nitro-3-yl-2(1H)-pyridone nucleobase
  modified_base order(3,12): mod_base = OTHER; note = 2-Prime-Fluoro modified nucleoside
  modified_base order(1..2,4..7,11,13..20): mod_base = OTHER; note = 2-Prime-O-Methyl modified nucleoside
  modified_base order(1^2,19^20): mod_base = OTHER; note = (1,3-dimethylimidazolidin-2-ylidene) Phosphoramidate linkage
  modified_base order(2..10,11..19): mod_base = OTHER; note = Phosphorothioate linkage
  modified_base 10^11: mod_base = OTHER; note = Methylphosphonate linkage
  misc_feature 1..20: note = RM110820
tctgaggantgggttcattt

SEQ ID NO: 1029 - DNA, 20 bp, synthetic construct
  source 1..20: mol_type = other DNA
  misc_feature 6..7: note = DNA
  misc_feature order(1..5,8..20): note = RNA
  modified_base 5: mod_base = OTHER; note = 2-Prime-O-Methoxyethyl modified nucleoside
  modified_base 6: mod_base = OTHER; note = DNA nucleotide carrying a 6-amino-5-nitro-3-yl-2(1H)-pyridone nucleobase
  modified_base order(3..4,9,11,18..19): mod_base = OTHER; note = 2-Prime-Fluoro modified nucleoside
  modified_base order(1..2,8,10,12..17,20): mod_base = OTHER; note = 2-Prime-O-Methyl modified nucleoside
  modified_base order(1^2,19^20): mod_base = OTHER; note = (1,3-dimethylimidazolidin-2-ylidene) Phosphoramidate linkage
  modified_base order(2..7,8..19): mod_base = OTHER; note = Phosphorothioate linkage
  modified_base 7^8: mod_base = OTHER; note = Methylphosphonate linkage
  misc_feature 1..20: note = RM110821
gaggantgggttcatttttc

SEQ ID NO: 1030 - DNA, 20 bp, synthetic construct
  source 1..20: mol_type = other DNA
  misc_feature 15..16: note = DNA
  misc_feature order(1..14,17..20): note = RNA
  modified_base 14: mod_base = OTHER; note = 2-Prime-O-Methoxyethyl modified nucleoside
  modified_base 15: mod_base = OTHER; note = DNA nucleotide carrying a 6-amino-5-nitro-3-yl-2(1H)-pyridone nucleobase
  modified_base order(8,11,18): mod_base = OTHER; note = 2-Prime-Fluoro modified nucleoside
  modified_base order(1..7,9..10,12..13,17,19..20): mod_base = OTHER; note = 2-Prime-O-Methyl modified nucleoside
  modified_base order(1^2,19^20): mod_base = OTHER; note = (1,3-dimethylimidazolidin-2-ylidene) Phosphoramidate linkage
  modified_base order(2..16,17..19): mod_base = OTHER; note = Phosphorothioate linkage
  modified_base 16^17: mod_base = OTHER; note = Methylphosphonate linkage
  misc_feature 1..20: note = RM110822
caaacctctgaggantgggt

SEQ ID NO: 1031 - DNA, 20 bp, synthetic construct
  source 1..20: mol_type = other DNA
  misc_feature 12..13: note = DNA
  misc_feature order(1..11,14..20): note = RNA
  modified_base 11: mod_base = OTHER; note = 2-Prime-O-Methoxyethyl modified nucleoside
  modified_base 12: mod_base = OTHER; note = DNA nucleotide carrying a 6-amino-5-nitro-3-yl-2(1H)-pyridone nucleobase
  modified_base order(1,15): mod_base = OTHER; note = 2-Prime-Fluoro modified nucleoside
  modified_base order(2..10,14,16..20): mod_base = OTHER; note = 2-Prime-O-Methyl modified nucleoside
  modified_base order(1^2,19^20): mod_base = OTHER; note = (1,3-dimethylimidazolidin-2-ylidene) Phosphoramidate linkage
  modified_base order(2..13,14..19): mod_base = OTHER; note = Phosphorothioate linkage
  modified_base 13^14: mod_base = OTHER; note = Methylphosphonate linkage
  misc_feature 1..20: note = RM110823
acctctgaggantgggttca

SEQ ID NO: 1032 - DNA, 20 bp, synthetic construct
  source 1..20: mol_type = other DNA
  misc_feature 9..10: note = DNA
  misc_feature order(1..8,11..20): note = RNA
  modified_base 8: mod_base = OTHER; note = 2-Prime-O-Methoxyethyl modified nucleoside
  modified_base 9: mod_base = OTHER; note = DNA nucleotide carrying a 6-amino-5-nitro-3-yl-2(1H)-pyridone nucleobase
  modified_base order(3,12..13,17..18): mod_base = OTHER; note = 2-Prime-Fluoro modified nucleoside
  modified_base order(1..2,4..7,11,14..16,19..20): mod_base = OTHER; note = 2-Prime-O-Methyl modified nucleoside
  modified_base order(1^2,19^20): mod_base = OTHER; note = (1,3-dimethylimidazolidin-2-ylidene) Phosphoramidate linkage
  modified_base order(2..10,11..19): mod_base = OTHER; note = Phosphorothioate linkage
  modified_base 10^11: mod_base = OTHER; note = Methylphosphonate linkage
  misc_feature 1..20: note = RM110824
tctgaggantgggttcattt

SEQ ID NO: 1033 - DNA, 20 bp, synthetic construct
  source 1..20: mol_type = other DNA
  misc_feature 15..16: note = DNA
  misc_feature order(1..14,17..20): note = RNA
  modified_base 14: mod_base = OTHER; note = 2-Prime-O-Methoxyethyl modified nucleoside
  modified_base 15: mod_base = OTHER; note = DNA nucleotide carrying a 6-amino-5-nitro-3-yl-2(1H)-pyridone nucleobase
  modified_base order(4..5,9..10,18,20): mod_base = OTHER; note = 2-Prime-Fluoro modified nucleoside
  modified_base order(1..3,6..8,11..13,17,19): mod_base = OTHER; note = 2-Prime-O-Methyl modified nucleoside
  modified_base order(1^2,19^20): mod_base = OTHER; note = (1,3-dimethylimidazolidin-2-ylidene) Phosphoramidate linkage
  modified_base order(2..16,17..19): mod_base = OTHER; note = Phosphorothioate linkage
  modified_base 16^17: mod_base = OTHER; note = Methylphosphonate linkage
  misc_feature 1..20: note = RM110825
caaacctctgaggantgggt

SEQ ID NO: 1034 - DNA, 20 bp, synthetic construct
  source 1..20: mol_type = other DNA
  misc_feature 15..16: note = DNA
  misc_feature order(1..14,17..20): note = RNA
  modified_base 14: mod_base = OTHER; note = 2-Prime-O-Methoxyethyl modified nucleoside
  modified_base 15: mod_base = OTHER; note = DNA nucleotide carrying a 6-amino-5-nitro-3-yl-2(1H)-pyridone nucleobase
  modified_base order(9,11,18,20): mod_base = OTHER; note = 2-Prime-Fluoro modified nucleoside
  modified_base order(1..8,10,12..13,17,19): mod_base = OTHER; note = 2-Prime-O-Methyl modified nucleoside
  modified_base order(1^2,19^20): mod_base = OTHER; note = (1,3-dimethylimidazolidin-2-ylidene) Phosphoramidate linkage
  modified_base order(2..16,17..19): mod_base = OTHER; note = Phosphorothioate linkage
  modified_base 16^17: mod_base = OTHER; note = Methylphosphonate linkage
  misc_feature 1..20: note = RM110826
caaacctctgaggantgggt

SEQ ID NO: 1035 - DNA, 20 bp, synthetic construct
  source 1..20: mol_type = other DNA
  misc_feature 12..13: note = DNA
  misc_feature order(1..11,14..20): note = RNA
  modified_base 11: mod_base = OTHER; note = 2-Prime-O-Methoxyethyl modified nucleoside
  modified_base 12: mod_base = OTHER; note = DNA nucleotide carrying a 6-amino-5-nitro-3-yl-2(1H)-pyridone nucleobase
  modified_base order(10,15..16): mod_base = OTHER; note = 2-Prime-Fluoro modified nucleoside
  modified_base order(1..9,14,17..20): mod_base = OTHER; note = 2-Prime-O-Methyl modified nucleoside
  modified_base order(1^2,19^20): mod_base = OTHER; note = (1,3-dimethylimidazolidin-2-ylidene) Phosphoramidate linkage
  modified_base order(2..13,14..19): mod_base = OTHER; note = Phosphorothioate linkage
  modified_base 13^14: mod_base = OTHER; note = Methylphosphonate linkage
  misc_feature 1..20: note = RM110827
acctctgaggantgggttca

SEQ ID NO: 1036 - DNA, 20 bp, synthetic construct
  source 1..20: mol_type = other DNA
  misc_feature 12..13: note = DNA
  misc_feature order(1..11,14..20): note = RNA
  modified_base 11: mod_base = OTHER; note = 2-Prime-O-Methoxyethyl modified nucleoside
  modified_base 12: mod_base = OTHER; note = DNA nucleotide carrying a 6-amino-5-nitro-3-yl-2(1H)-pyridone nucleobase
  modified_base order(10,15,17..18,20): mod_base = OTHER; note = 2-Prime-Fluoro modified nucleoside
  modified_base order(1..9,14,16,19): mod_base = OTHER; note = 2-Prime-O-Methyl modified nucleoside
  modified_base order(1^2,19^20): mod_base = OTHER; note = (1,3-dimethylimidazolidin-2-ylidene) Phosphoramidate linkage
  modified_base order(2..13,14..19): mod_base = OTHER; note = Phosphorothioate linkage
  modified_base 13^14: mod_base = OTHER; note = Methylphosphonate linkage
  misc_feature 1..20: note = RM110828
acctctgaggantgggttca

SEQ ID NO: 1037 - DNA, 20 bp, synthetic construct
  source 1..20: mol_type = other DNA
  misc_feature 12..13: note = DNA
  misc_feature order(1..11,14..20): note = RNA
  modified_base 11: mod_base = OTHER; note = 2-Prime-O-Methoxyethyl modified nucleoside
  modified_base 12: mod_base = OTHER; note = DNA nucleotide carrying a 6-amino-5-nitro-3-yl-2(1H)-pyridone nucleobase
  modified_base order(4..6,9,15..16): mod_base = OTHER; note = 2-Prime-Fluoro modified nucleoside
  modified_base order(1..3,7..8,10,14,17..20): mod_base = OTHER; note = 2-Prime-O-Methyl modified nucleoside
  modified_base order(1^2,19^20): mod_base = OTHER; note = (1,3-dimethylimidazolidin-2-ylidene) Phosphoramidate linkage
  modified_base order(2..13,14..19): mod_base = OTHER; note = Phosphorothioate linkage
  modified_base 13^14: mod_base = OTHER; note = Methylphosphonate linkage
  misc_feature 1..20: note = RM110829
acctctgaggantgggttca

SEQ ID NO: 1038 - DNA, 20 bp, synthetic construct
  source 1..20: mol_type = other DNA
  misc_feature 6..7: note = DNA
  misc_feature order(1..5,8..20): note = RNA
  modified_base 5: mod_base = OTHER; note = 2-Prime-O-Methoxyethyl modified nucleoside
  modified_base 6: mod_base = OTHER; note = DNA nucleotide carrying a 6-amino-5-nitro-3-yl-2(1H)-pyridone nucleobase
  modified_base order(1,9): mod_base = OTHER; note = 2-Prime-Fluoro modified nucleoside
  modified_base order(2..4,8,10..20): mod_base = OTHER; note = 2-Prime-O-Methyl modified nucleoside
  modified_base order(1^2,19^20): mod_base = OTHER; note = (1,3-dimethylimidazolidin-2-ylidene) Phosphoramidate linkage
  modified_base order(2..7,8..19): mod_base = OTHER; note = Phosphorothioate linkage
  modified_base 7^8: mod_base = OTHER; note = Methylphosphonate linkage
  misc_feature 1..20: note = RM110830
gaggantgggttcatttttc

SEQ ID NO: 1039 - DNA, 32 bp, synthetic construct; identical to SEQ ID NO: 132
  source 1..32: mol_type = other DNA
  misc_feature 12..14: note = DNA
  misc_feature order(1..11,15..32): note = RNA
  modified_base 13: mod_base = OTHER; note = DNA nucleotide carrying a 6-amino-5-nitro-3-yl-2(1H)-pyridone nucleobase
  modified_base order(9,16..17): mod_base = OTHER; note = 2-Prime-Fluoro modified nucleoside
  modified_base order(1..8,10..11,15,18..32): mod_base = OTHER; note = 2-Prime-O-Methyl modified nucleoside
  modified_base order(1^2,31^32): mod_base = OTHER; note = (1,3-dimethylimidazolidin-2-ylidene) Phosphoramidate linkage
  modified_base order(2..14,15..31): mod_base = OTHER; note = Phosphorothioate linkage
  modified_base 14^15: mod_base = OTHER; note = Methylphosphonate linkage
  misc_feature 1..32: note = RM110831

SEQ ID NO: 1040 - DNA, 32 bp, synthetic construct; identical to SEQ ID NO: 133
  source 1..32: mol_type = other DNA
  misc_feature 9..11: note = DNA
  misc_feature order(1..8,12..32): note = RNA
  modified_base 10: mod_base = OTHER; note = DNA nucleotide carrying a 6-amino-5-nitro-3-yl-2(1H)-pyridone nucleobase
  modified_base order(8,13,16): mod_base = OTHER; note = 2-Prime-Fluoro modified nucleoside
  modified_base order(1..7,12,14..15,17..32): mod_base = OTHER; note = 2-Prime-O-Methyl modified nucleoside
  modified_base order(1^2,31^32): mod_base = OTHER; note = (1,3-dimethylimidazolidin-2-ylidene) Phosphoramidate linkage
  modified_base order(2..11,12..31): mod_base = OTHER; note = Phosphorothioate linkage
  modified_base 11^12: mod_base = OTHER; note = Methylphosphonate linkage
  misc_feature 1..32: note = RM110832

SEQ ID NO: 1041 - DNA, 32 bp, synthetic construct; identical to SEQ ID NO: 132
  source 1..32: mol_type = other DNA
  misc_feature 12..14: note = DNA
  misc_feature order(1..11,15..32): note = RNA
  modified_base 13: mod_base = OTHER; note = DNA nucleotide carrying a 6-amino-5-nitro-3-yl-2(1H)-pyridone nucleobase
  modified_base order(11,16,19): mod_base = OTHER; note = 2-Prime-Fluoro modified nucleoside
  modified_base order(1..10,15,17..18,20..32): mod_base = OTHER; note = 2-Prime-O-Methyl modified nucleoside
  modified_base order(1^2,31^32): mod_base = OTHER; note = (1,3-dimethylimidazolidin-2-ylidene) Phosphoramidate linkage
  modified_base order(2..14,15..31): mod_base = OTHER; note = Phosphorothioate linkage
  modified_base 14^15: mod_base = OTHER; note = Methylphosphonate linkage
  misc_feature 1..32: note = RM110833

SEQ ID NO: 1042 - DNA, 32 bp, synthetic construct; identical to SEQ ID NO: 134
  source 1..32: mol_type = other DNA
  misc_feature 6..8: note = DNA
  misc_feature order(1..5,9..32): note = RNA
  modified_base 7: mod_base = OTHER; note = DNA nucleotide carrying a 6-amino-5-nitro-3-yl-2(1H)-pyridone nucleobase
  modified_base order(3,10..11): mod_base = OTHER; note = 2-Prime-Fluoro modified nucleoside
  modified_base order(1..2,4..5,9,12..32): mod_base = OTHER; note = 2-Prime-O-Methyl modified nucleoside
  modified_base order(1^2,31^32): mod_base = OTHER; note = (1,3-dimethylimidazolidin-2-ylidene) Phosphoramidate linkage
  modified_base order(2..8,9..31): mod_base = OTHER; note = Phosphorothioate linkage
  modified_base 8^9: mod_base = OTHER; note = Methylphosphonate linkage
  misc_feature 1..32: note = RM110834

SEQ ID NO: 1043 - DNA, 29 bp, synthetic construct
  source 1..29: mol_type = other DNA
  misc_feature 20..22: note = DNA
  misc_feature order(1..19,23..29): note = RNA
  modified_base 21: mod_base = OTHER; note = DNA nucleotide carrying a 6-amino-5-nitro-3-yl-2(1H)-pyridone nucleobase
  modified_base order(14,24): mod_base = OTHER; note = 2-Prime-Fluoro modified nucleoside
  modified_base order(1..13,15..19,23,25..29): mod_base = OTHER; note = 2-Prime-O-Methyl modified nucleoside
  modified_base order(1^2,28^29): mod_base = OTHER; note = (1,3-dimethylimidazolidin-2-ylidene) Phosphoramidate linkage
  modified_base order(2..22,23..28): mod_base = OTHER; note = Phosphorothioate linkage
  modified_base 22^23: mod_base = OTHER; note = Methylphosphonate linkage
  misc_feature 1..29: note = RM110835
ttcggtcaaacctctgaggantgggttca

SEQ ID NO: 1044 - DNA, 23 bp, synthetic construct
  source 1..23: mol_type = other DNA
  misc_feature 18..19: note = DNA
  misc_feature order(1..17,20..23): note = RNA
  modified_base 17: mod_base = OTHER; note = 2-Prime-O-Methoxyethyl modified nucleoside
  modified_base 18: mod_base = OTHER; note = DNA nucleotide carrying a 6-amino-5-nitro-3-yl-2(1H)-pyridone nucleobase
  modified_base order(12,14,21,23): mod_base = OTHER; note = 2-Prime-Fluoro modified nucleoside
  modified_base order(1..11,13,15..16,20,22): mod_base = OTHER; note = 2-Prime-O-Methyl modified nucleoside
  modified_base order(1^2,22^23): mod_base = OTHER; note = (1,3-dimethylimidazolidin-2-ylidene) Phosphoramidate linkage
  modified_base 17..19: mod_base = OTHER; note = Phosphorothioate linkage
  modified_base 19^20: mod_base = OTHER; note = Methylphosphonate linkage
  misc_feature 1..23: note = RM110836
ggtcaaacctctgaggantgggt

SEQ ID NO: 1045 - DNA, 26 bp, synthetic construct
  source 1..26: mol_type = other DNA
  misc_feature 16..17: note = DNA
  misc_feature order(1..15,18..26): note = RNA
  modified_base 15: mod_base = OTHER; note = 2-Prime-O-Methoxyethyl modified nucleoside
  modified_base 16: mod_base = OTHER; note = DNA nucleotide carrying a 6-amino-5-nitro-3-yl-2(1H)-pyridone nucleobase
  modified_base order(7,19): mod_base = OTHER; note = 2-Prime-Fluoro modified nucleoside
  modified_base order(1..6,8..14,18,20..26): mod_base = OTHER; note = 2-Prime-O-Methyl modified nucleoside
  modified_base order(1^2,25^26): mod_base = OTHER; note = (1,3-dimethylimidazolidin-2-ylidene) Phosphoramidate linkage
  modified_base 15..17: mod_base = OTHER; note = Phosphorothioate linkage
  modified_base 17^18: mod_base = OTHER; note = Methylphosphonate linkage
  misc_feature 1..26: note = RM110837
tcaaacctctgaggantgggttcatt

SEQ ID NO: 1046 - DNA, 23 bp, synthetic construct
  source 1..23: mol_type = other DNA
  misc_feature 18..19: note = DNA
  misc_feature order(1..17,20..23): note = RNA
  modified_base 17: mod_base = OTHER; note = 2-Prime-O-Methoxyethyl modified nucleoside
  modified_base 18: mod_base = OTHER; note = DNA nucleotide carrying a 6-amino-5-nitro-3-yl-2(1H)-pyridone nucleobase
  modified_base order(4,10,21,23): mod_base = OTHER; note = 2-Prime-Fluoro modified nucleoside
  modified_base order(1..3,5..9,11..16,20,22): mod_base = OTHER; note = 2-Prime-O-Methyl modified nucleoside
  modified_base order(1^2,22^23): mod_base = OTHER; note = (1,3-dimethylimidazolidin-2-ylidene) Phosphoramidate linkage
  modified_base 17..19: mod_base = OTHER; note = Phosphorothioate linkage
  modified_base 19^20: mod_base = OTHER; note = Methylphosphonate linkage
  misc_feature 1..23: note = RM110838
ggtcaaacctctgaggantgggt

SEQ ID NO: 1047 - DNA, 32 bp, synthetic construct; identical to SEQ ID NO: 132
  source 1..32: mol_type = other DNA
  misc_feature 13..14: note = DNA
  misc_feature order(1..12,15..32): note = RNA
  modified_base 12: mod_base = OTHER; note = 2-Prime-O-Methoxyethyl modified nucleoside
  modified_base 13: mod_base = OTHER; note = DNA nucleotide carrying a 6-amino-5-nitro-3-yl-2(1H)-pyridone nucleobase
  modified_base order(3..4,7,16..17,21..22,25,28): mod_base = OTHER; note = 2-Prime-Fluoro modified nucleoside
  modified_base order(1..2,5..6,8..11,15,18..20,23..24,26..27,29..32): mod_base = OTHER; note = 2-Prime-O-Methyl modified nucleoside
  modified_base order(1^2,31^32): mod_base = OTHER; note = (1,3-dimethylimidazolidin-2-ylidene) Phosphoramidate linkage
  modified_base 12..14: mod_base = OTHER; note = Phosphorothioate linkage
  modified_base 14^15: mod_base = OTHER; note = Methylphosphonate linkage
  misc_feature 1..32: note = RM110839

SEQ ID NO: 1048 - DNA, 32 bp, synthetic construct; identical to SEQ ID NO: 132
  source 1..32: mol_type = other DNA
  misc_feature 13..14: note = DNA
  misc_feature order(1..12,15..32): note = RNA
  modified_base 12: mod_base = OTHER; note = 2-Prime-O-Methoxyethyl modified nucleoside
  modified_base 13: mod_base = OTHER; note = DNA nucleotide carrying a 6-amino-5-nitro-3-yl-2(1H)-pyridone nucleobase
  modified_base order(1,6..7,9,16,18): mod_base = OTHER; note = 2-Prime-Fluoro modified nucleoside
  modified_base order(2..5,8,10..11,15,17,19..32): mod_base = OTHER; note = 2-Prime-O-Methyl modified nucleoside
  modified_base order(1^2,31^32): mod_base = OTHER; note = (1,3-dimethylimidazolidin-2-ylidene) Phosphoramidate linkage
  modified_base 12..14: mod_base = OTHER; note = Phosphorothioate linkage
  modified_base 14^15: mod_base = OTHER; note = Methylphosphonate linkage
  misc_feature 1..32: note = RM110840

SEQ ID NO: 1049 - DNA, 26 bp, synthetic construct
  source 1..26: mol_type = other DNA
  misc_feature 16..17: note = DNA
  misc_feature order(1..15,18..26): note = RNA
  modified_base 15: mod_base = OTHER; note = 2-Prime-O-Methoxyethyl modified nucleoside
  modified_base 16: mod_base = OTHER; note = DNA nucleotide carrying a 6-amino-5-nitro-3-yl-2(1H)-pyridone nucleobase
  modified_base order(2..3,6..7,19): mod_base = OTHER; note = 2-Prime-Fluoro modified nucleoside
  modified_base order(1,4..5,8..14,18,20..26): mod_base = OTHER; note = 2-Prime-O-Methyl modified nucleoside
  modified_base order(1^2,25^26): mod_base = OTHER; note = (1,3-dimethylimidazolidin-2-ylidene) Phosphoramidate linkage
  modified_base 15..17: mod_base = OTHER; note = Phosphorothioate linkage
  modified_base 17^18: mod_base = OTHER; note = Methylphosphonate linkage
  misc_feature 1..26: note = RM110841
tcaaacctctgaggantgggttcatt

SEQ ID NO: 1050 - DNA, 26 bp, synthetic construct
  source 1..26: mol_type = other DNA
  misc_feature 16..17: note = DNA
  misc_feature order(1..15,18..26): note = RNA
  modified_base 15: mod_base = OTHER; note = 2-Prime-O-Methoxyethyl modified nucleoside
  modified_base 16: mod_base = OTHER; note = DNA nucleotide carrying a 6-amino-5-nitro-3-yl-2(1H)-pyridone nucleobase
  modified_base order(1..2,12,19..20,24..25): mod_base = OTHER; note = 2-Prime-Fluoro modified nucleoside
  modified_base order(3..11,13..14,18,21..23,26): mod_base = OTHER; note = 2-Prime-O-Methyl modified nucleoside
  modified_base order(1^2,25^26): mod_base = OTHER; note = (1,3-dimethylimidazolidin-2-ylidene) Phosphoramidate linkage
  modified_base 15..17: mod_base = OTHER; note = Phosphorothioate linkage
  modified_base 17^18: mod_base = OTHER; note = Methylphosphonate linkage
  misc_feature 1..26: note = RM110842
tcaaacctctgaggantgggttcatt

SEQ ID NO: 1051 - DNA, 23 bp, synthetic construct
  source 1..23: mol_type = other DNA
  misc_feature 18..19: note = DNA
  misc_feature order(1..17,20..23): note = RNA
  modified_base 17: mod_base = OTHER; note = 2-Prime-O-Methoxyethyl modified nucleoside
  modified_base 18: mod_base = OTHER; note = DNA nucleotide carrying a 6-amino-5-nitro-3-yl-2(1H)-pyridone nucleobase
  modified_base order(9,12,14..15,21..22): mod_base = OTHER; note = 2-Prime-Fluoro modified nucleoside
  modified_base order(1..8,10..11,13,16,20,23): mod_base = OTHER; note = 2-Prime-O-Methyl modified nucleoside
  modified_base order(1^2,22^23): mod_base = OTHER; note = (1,3-dimethylimidazolidin-2-ylidene) Phosphoramidate linkage
  modified_base 17..19: mod_base = OTHER; note = Phosphorothioate linkage
  modified_base 19^20: mod_base = OTHER; note = Methylphosphonate linkage
  misc_feature 1..23: note = RM110843
ggtcaaacctctgaggantgggt

SEQ ID NO: 1052 - DNA, 23 bp, synthetic construct
  source 1..23: mol_type = other DNA
  misc_feature 12..13: note = DNA
  misc_feature order(1..11,14..23): note = RNA
  modified_base 11: mod_base = OTHER; note = 2-Prime-O-Methoxyethyl modified nucleoside
  modified_base 12: mod_base = OTHER; note = DNA nucleotide carrying a 6-amino-5-nitro-3-yl-2(1H)-pyridone nucleobase
  modified_base order(6,8,15,17): mod_base = OTHER; note = 2-Prime-Fluoro modified nucleoside
  modified_base order(1..5,7,9..10,14,16,18..23): mod_base = OTHER; note = 2-Prime-O-Methyl modified nucleoside
  modified_base order(1^2,22^23): mod_base = OTHER; note = (1,3-dimethylimidazolidin-2-ylidene) Phosphoramidate linkage
  modified_base 11..13: mod_base = OTHER; note = Phosphorothioate linkage
  modified_base 13^14: mod_base = OTHER; note = Methylphosphonate linkage
  misc_feature 1..23: note = RM110844
acctctgaggantgggttcattt

SEQ ID NO: 1053 - DNA, 29 bp, synthetic construct
  source 1..29: mol_type = other DNA
  misc_feature 9..10: note = DNA
  misc_feature order(1..8,11..29): note = RNA
  modified_base 8: mod_base = OTHER; note = 2-Prime-O-Methoxyethyl modified nucleoside
  modified_base 9: mod_base = OTHER; note = DNA nucleotide carrying a 6-amino-5-nitro-3-yl-2(1H)-pyridone nucleobase
  modified_base order(2,12): mod_base = OTHER; note = 2-Prime-Fluoro modified nucleoside
  modified_base order(1,3..7,11,13..29): mod_base = OTHER; note = 2-Prime-O-Methyl modified nucleoside
  modified_base order(1^2,28^29): mod_base = OTHER; note = (1,3-dimethylimidazolidin-2-ylidene) Phosphoramidate linkage
  modified_base 8..10: mod_base = OTHER; note = Phosphorothioate linkage
  modified_base 10^11: mod_base = OTHER; note = Methylphosphonate linkage
  misc_feature 1..29: note = RM110845
tctgaggantgggttcatttttcttgtct

SEQ ID NO: 1054 - DNA, 32 bp, synthetic construct; identical to SEQ ID NO: 132
  source 1..32: mol_type = other DNA
  misc_feature 13..14: note = DNA
  misc_feature order(1..12,15..32): note = RNA
  modified_base 12: mod_base = OTHER; note = 2-Prime-O-Methoxyethyl modified nucleoside
  modified_base 13: mod_base = OTHER; note = DNA nucleotide carrying a 6-amino-5-nitro-3-yl-2(1H)-pyridone nucleobase
  modified_base order(3..4,7,16..17,21..22,25,28): mod_base = OTHER; note = 2-Prime-Fluoro modified nucleoside
  modified_base order(1..2,5..6,8..11,15,18..20,23..24,26..27,29..32): mod_base = OTHER; note = 2-Prime-O-Methyl modified nucleoside
  modified_base order(1^2,31^32): mod_base = OTHER; note = (1,3-dimethylimidazolidin-2-ylidene) Phosphoramidate linkage
  modified_base order(3..5,7^8,12..14,16..18,21..23,25^26,28^29): mod_base = OTHER; note = Phosphorothioate linkage
  modified_base 14^15: mod_base = OTHER; note = Methylphosphonate linkage
  misc_feature 1..32: note = RM110846

SEQ ID NO: 1055 - DNA, 23 bp, synthetic construct
  source 1..23: mol_type = other DNA
  misc_feature 18..19: note = DNA
  misc_feature order(1..17,20..23): note = RNA
  modified_base 17: mod_base = OTHER; note = 2-Prime-O-Methoxyethyl modified nucleoside
  modified_base 18: mod_base = OTHER; note = DNA nucleotide carrying a 6-amino-5-nitro-3-yl-2(1H)-pyridone nucleobase
  modified_base order(12,14,21,23): mod_base = OTHER; note = 2-Prime-Fluoro modified nucleoside
  modified_base order(1..11,13,15..16,20,22): mod_base = OTHER; note = 2-Prime-O-Methyl modified nucleoside
  modified_base order(1^2,22^23): mod_base = OTHER; note = (1,3-dimethylimidazolidin-2-ylidene) Phosphoramidate linkage
  modified_base order(12^13,14^15,17..19,21^22): mod_base = OTHER; note = Phosphorothioate linkage
  modified_base 19^20: mod_base = OTHER; note = Methylphosphonate linkage
  misc_feature 1..23: note = RM110847
ggtcaaacctctgaggantgggt

SEQ ID NO: 1056 - DNA, 23 bp, synthetic construct
  source 1..23: mol_type = other DNA
  misc_feature 12..13: note = DNA
  misc_feature order(1..11,14..23): note = RNA
  modified_base 11: mod_base = OTHER; note = 2-Prime-O-Methoxyethyl modified nucleoside
  modified_base 12: mod_base = OTHER; note = DNA nucleotide carrying a 6-amino-5-nitro-3-yl-2(1H)-pyridone nucleobase
  modified_base order(6,8,15,17): mod_base = OTHER; note = 2-Prime-Fluoro modified nucleoside
  modified_base order(1..5,7,9..10,14,16,18..23): mod_base = OTHER; note = 2-Prime-O-Methyl modified nucleoside
  modified_base order(1^2,22^23): mod_base = OTHER; note = (1,3-dimethylimidazolidin-2-ylidene) Phosphoramidate linkage
  modified_base order(6^7,8^9,11..13,15^16,17^18): mod_base = OTHER; note = Phosphorothioate linkage
  modified_base 13^14: mod_base = OTHER; note = Methylphosphonate linkage
  misc_feature 1..23: note = RM110848
acctctgaggantgggttcattt

SEQ ID NO: 1057 - DNA, 26 bp, synthetic construct
  source 1..26: mol_type = other DNA
  misc_feature 16..17: note = DNA
  misc_feature order(1..15,18..26): note = RNA
  modified_base 15: mod_base = OTHER; note = 2-Prime-O-Methoxyethyl modified nucleoside
  modified_base 16: mod_base = OTHER; note = DNA nucleotide carrying a 6-amino-5-nitro-3-yl-2(1H)-pyridone nucleobase
  modified_base order(7,19): mod_base = OTHER; note = 2-Prime-Fluoro modified nucleoside
  modified_base order(1..6,8..14,18,20..26): mod_base = OTHER; note = 2-Prime-O-Methyl modified nucleoside
  modified_base order(1^2,25^26): mod_base = OTHER; note = (1,3-dimethylimidazolidin-2-ylidene) Phosphoramidate linkage
  modified_base order(7^8,15..17,19^20): mod_base = OTHER; note = Phosphorothioate linkage
  modified_base 17^18: mod_base = OTHER; note = Methylphosphonate linkage
  misc_feature 1..26: note = RM110849
tcaaacctctgaggantgggttcatt

SEQ ID NO: 1058 - DNA, 32 bp, synthetic construct; identical to SEQ ID NO: 132
  source 1..32: mol_type = other DNA
  misc_feature 13..14: note = DNA
  misc_feature order(1..12,15..32): note = RNA
  modified_base 12: mod_base = OTHER; note = 2-Prime-O-Methoxyethyl modified nucleoside
  modified_base 13: mod_base = OTHER; note = DNA nucleotide carrying a 6-amino-5-nitro-3-yl-2(1H)-pyridone nucleobase
  modified_base order(1,6..7,9,16,18): mod_base = OTHER; note = 2-Prime-Fluoro modified nucleoside
  modified_base order(2..5,8,10..11,15,17,19..32): mod_base = OTHER; note = 2-Prime-O-Methyl modified nucleoside
  modified_base order(1^2,31^32): mod_base = OTHER; note = (1,3-dimethylimidazolidin-2-ylidene) Phosphoramidate linkage
  modified_base order(6..8,9^10,12..14,16^17,18^19): mod_base = OTHER; note = Phosphorothioate linkage
  modified_base 14^15: mod_base = OTHER; note = Methylphosphonate linkage
  misc_feature 1..32: note = RM110850

SEQ ID NO: 1059 - DNA, 32 bp, synthetic construct; identical to SEQ ID NO: 132
  source 1..32: mol_type = other DNA
  misc_feature 13..14: note = DNA
  misc_feature order(1..12,15..32): note = RNA
  modified_base 12: mod_base = OTHER; note = 2-Prime-O-Methoxyethyl modified nucleoside
  modified_base 13: mod_base = OTHER; note = DNA nucleotide carrying a 6-amino-5-nitro-3-yl-2(1H)-pyridone nucleobase
  modified_base order(3..4,7,16..17,21..22,25,28): mod_base = OTHER; note = 2-Prime-Fluoro modified nucleoside
  modified_base order(1..2,5..6,8..11,15,18..20,23..24,26..27,29..32): mod_base = OTHER; note = 2-Prime-O-Methyl modified nucleoside
  modified_base order(1^2,31^32): mod_base = OTHER; note = (1,3-dimethylimidazolidin-2-ylidene) Phosphoramidate linkage
  modified_base order(3^4,5^6,7^8,9^10,11..14,15^16,17^18,19^20,21^22,23^24,25^26,27^28,29^30): mod_base = OTHER; note = Phosphorothioate linkage
  modified_base 14^15: mod_base = OTHER; note = Methylphosphonate linkage
  misc_feature 1..32: note = RM110851

SEQ ID NO: 1060 - DNA, 23 bp, synthetic construct
  source 1..23: mol_type = other DNA
  misc_feature 18..19: note = DNA
  misc_feature order(1..17,20..23): note = RNA
  modified_base 17: mod_base = OTHER; note = 2-Prime-O-Methoxyethyl modified nucleoside
  modified_base 18: mod_base = OTHER; note = DNA nucleotide carrying a 6-amino-5-nitro-3-yl-2(1H)-pyridone nucleobase
  modified_base order(12,14,21,23): mod_base = OTHER; note = 2-Prime-Fluoro modified nucleoside
  modified_base order(1..11,13,15..16,20,22): mod_base = OTHER; note = 2-Prime-O-Methyl modified nucleoside
  modified_base order(1^2,22^23): mod_base = OTHER; note = (1,3-dimethylimidazolidin-2-ylidene) Phosphoramidate linkage
  modified_base order(3^4,5^6,7^8,9^10,11^12,13^14,15^16,17..19,21^22): mod_base = OTHER; note = Phosphorothioate linkage
  modified_base 19^20: mod_base = OTHER; note = Methylphosphonate linkage
  misc_feature 1..23: note = RM110852
ggtcaaacctctgaggantgggt

SEQ ID NO: 1061 - DNA, 23 bp, synthetic construct
  source 1..23: mol_type = other DNA
  misc_feature 12..13: note = DNA
  misc_feature order(1..11,14..23): note = RNA
  modified_base 11: mod_base = OTHER; note = 2-Prime-O-Methoxyethyl modified nucleoside
  modified_base 12: mod_base = OTHER; note = DNA nucleotide carrying a 6-amino-5-nitro-3-yl-2(1H)-pyridone nucleobase
  modified_base order(6,8,15,17): mod_base = OTHER; note = 2-Prime-Fluoro modified nucleoside
  modified_base order(1..5,7,9..10,14,16,18..23): mod_base = OTHER; note = 2-Prime-O-Methyl modified nucleoside
  modified_base order(1^2,22^23): mod_base = OTHER; note = (1,3-dimethylimidazolidin-2-ylidene) Phosphoramidate linkage
  modified_base order(3^4,5^6,7^8,9^10,11..13,15^16,17^18,19^20,21^22): mod_base = OTHER; note = Phosphorothioate linkage
  modified_base 13^14: mod_base = OTHER; note = Methylphosphonate linkage
  misc_feature 1..23: note = RM110853
acctctgaggantgggttcattt

SEQ ID NO: 1062 - DNA, 26 bp, synthetic construct
  source 1..26: mol_type = other DNA
  misc_feature 16..17: note = DNA
  misc_feature order(1..15,18..26): note = RNA
  modified_base 15: mod_base = OTHER; note = 2-Prime-O-Methoxyethyl modified nucleoside
  modified_base 16: mod_base = OTHER; note = DNA nucleotide carrying a 6-amino-5-nitro-3-yl-2(1H)-pyridone nucleobase
  modified_base order(7,19): mod_base = OTHER; note = 2-Prime-Fluoro modified nucleoside
  modified_base order(1..6,8..14,18,20..26): mod_base = OTHER; note = 2-Prime-O-Methyl modified nucleoside
  modified_base order(1^2,25^26): mod_base = OTHER; note = (1,3-dimethylimidazolidin-2-ylidene) Phosphoramidate linkage
  modified_base order(3^4,5^6,7^8,9^10,11^12,13^14,15..17,19^20,21^22,23^24): mod_base = OTHER; note = Phosphorothioate linkage
  modified_base 17^18: mod_base = OTHER; note = Methylphosphonate linkage
  misc_feature 1..26: note = RM110854
tcaaacctctgaggantgggttcatt

SEQ ID NO: 1063 - DNA, 32 bp, synthetic construct; identical to SEQ ID NO: 132
  source 1..32: mol_type = other DNA
  misc_feature 13..14: note = DNA
  misc_feature order(1..12,15..32): note = RNA
  modified_base 12: mod_base = OTHER; note = 2-Prime-O-Methoxyethyl modified nucleoside
  modified_base 13: mod_base = OTHER; note = DNA nucleotide carrying a 6-amino-5-nitro-3-yl-2(1H)-pyridone nucleobase
  modified_base order(1,6..7,9,16,18): mod_base = OTHER; note = 2-Prime-Fluoro modified nucleoside
  modified_base order(2..5,8,10..11,15,17,19..32): mod_base = OTHER; note = 2-Prime-O-Methyl modified nucleoside
  modified_base order(1^2,31^32): mod_base = OTHER; note = (1,3-dimethylimidazolidin-2-ylidene) Phosphoramidate linkage
  modified_base order(3^4,5^6,7^8,9^10,11..14,15^16,17^18,19^20,21^22,23^24,25^26,27^28,29^30): mod_base = OTHER; note = Phosphorothioate linkage
  modified_base 14^15: mod_base = OTHER; note = Methylphosphonate linkage
  misc_feature 1..32: note = RM110855

SEQ ID NO: 1064 - DNA, 26 bp, synthetic construct
  source 1..26: mol_type = other DNA
  misc_feature 13..14: note = DNA
  misc_feature order(1..12,15..26): note = RNA
  modified_base order(2,12,17): mod_base = OTHER; note = 2-Prime-O-Methoxyethyl modified nucleoside
  modified_base 3: mod_base = OTHER; note = 2-Prime-O-Methoxyethyl modified 5-methyl Cytidine
  modified_base 13: mod_base = OTHER; note = DNA nucleotide carrying a 6-amino-5-nitro-3-yl-2(1H)-pyridone nucleobase
  modified_base order(1,8,10..11,16,19,21,23): mod_base = OTHER; note = 2-Prime-Fluoro modified nucleoside
  modified_base order(4..7,9,15,18,20,22,24..26): mod_base = OTHER; note = 2-Prime-O-Methyl modified nucleoside
  modified_base order(1^2,25^26): mod_base = OTHER; note = (1,3-dimethylimidazolidin-2-ylidene) Phosphoramidate linkage
  modified_base order(4..12,13^14,16..25): mod_base = OTHER; note = Phosphorothioate linkage
  modified_base 14^15: mod_base = OTHER; note = Methylphosphonate linkage
  modified_base 14: mod_base = m5u; note = 5-methyluridine
  misc_feature 1..26: note = RM107689
aacctctgaggantgggttcattttt

SEQ ID NO: 1065 - DNA, 27 bp, synthetic construct
  source 1..27: mol_type = other DNA
  misc_feature 14..15: note = DNA
  misc_feature order(1..13,16..27): note = RNA
  modified_base order(3,13,18): mod_base = OTHER; note = 2-Prime-O-Methoxyethyl modified nucleoside
  modified_base 4: mod_base = OTHER; note = 2-Prime-O-Methoxyethyl modified 5-methyl Cytidine
  modified_base 14: mod_base = OTHER; note = DNA nucleotide carrying a 6-amino-5-nitro-3-yl-2(1H)-pyridone nucleobase
  modified_base order(2,9,11..12,17,20,22,24): mod_base = OTHER; note = 2-Prime-Fluoro modified nucleoside
  modified_base order(1,5..8,10,16,19,21,23,25..27): mod_base = OTHER; note = 2-Prime-O-Methyl modified nucleoside
  modified_base order(1^2,26^27): mod_base = OTHER; note = (1,3-dimethylimidazolidin-2-ylidene) Phosphoramidate linkage
  modified_base order(2^3,5..13,14^15,17..26): mod_base = OTHER; note = Phosphorothioate linkage
  modified_base 15^16: mod_base = OTHER; note = Methylphosphonate linkage
  modified_base 15: mod_base = m5u; note = 5-methyluridine
  misc_feature 1..27: note = RM110857
aaacctctgaggantgggttcattttt

SEQ ID NO: 1066 - DNA, 26 bp, synthetic construct
  source 1..26: mol_type = other DNA
  misc_feature 14..15: note = DNA
  misc_feature order(1..13,16..26): note = RNA
  modified_base order(3,13,18): mod_base = OTHER; note = 2-Prime-O-Methoxyethyl modified nucleoside
  modified_base 4: mod_base = OTHER; note = 2-Prime-O-Methoxyethyl modified 5-methyl Cytidine
  modified_base 14: mod_base = OTHER; note = DNA nucleotide carrying a 6-amino-5-nitro-3-yl-2(1H)-pyridone nucleobase
  modified_base order(2,9,11..12,17,20,22,24): mod_base = OTHER; note = 2-Prime-Fluoro modified nucleoside
  modified_base order(1,5..8,10,16,19,21,23,25..26): mod_base = OTHER; note = 2-Prime-O-Methyl modified nucleoside
  modified_base order(1^2,25^26): mod_base = OTHER; note = (1,3-dimethylimidazolidin-2-ylidene) Phosphoramidate linkage
  modified_base order(2^3,5..13,14^15,17..25): mod_base = OTHER; note = Phosphorothioate linkage
  modified_base 15^16: mod_base = OTHER; note = Methylphosphonate linkage
  modified_base 15: mod_base = m5u; note = 5-methyluridine
  misc_feature 1..26: note = RM110858
aaacctctgaggantgggttcatttt

SEQ ID NO: 1067 - DNA, 27 bp, synthetic construct
  source 1..27: mol_type = other DNA
  misc_feature 13..14: note = DNA
  misc_feature order(1..12,15..27): note = RNA
  modified_base order(2,12,17): mod_base = OTHER; note = 2-Prime-O-Methoxyethyl modified nucleoside
  modified_base 3: mod_base = OTHER; note = 2-Prime-O-Methoxyethyl modified 5-methyl Cytidine
  modified_base 13: mod_base = OTHER; note = DNA nucleotide carrying a 6-amino-5-nitro-3-yl-2(1H)-pyridone nucleobase
  modified_base order(1,8,10..11,16,19,21,23): mod_base = OTHER; note = 2-Prime-Fluoro modified nucleoside
  modified_base order(4..7,9,15,18,20,22,24..27): mod_base = OTHER; note = 2-Prime-O-Methyl modified nucleoside
  modified_base order(1^2,26^27): mod_base = OTHER; note = (1,3-dimethylimidazolidin-2-ylidene) Phosphoramidate linkage
  modified_base order(4..12,13^14,16..26): mod_base = OTHER; note = Phosphorothioate linkage
  modified_base 14^15: mod_base = OTHER; note = Methylphosphonate linkage
  modified_base 14: mod_base = m5u; note = 5-methyluridine
  misc_feature 1..27: note = RM110859
aacctctgaggantgggttcatttttc

SEQ ID NO: 1068 - DNA, 26 bp, synthetic construct
  source 1..26: mol_type = other DNA
  misc_feature 12..13: note = DNA
  misc_feature order(1..11,14..26): note = RNA
  modified_base order(1,11,16): mod_base = OTHER; note = 2-Prime-O-Methoxyethyl modified nucleoside
  modified_base 2: mod_base = OTHER; note = 2-Prime-O-Methoxyethyl modified 5-methyl Cytidine
  modified_base 12: mod_base = OTHER; note = DNA nucleotide carrying a 6-amino-5-nitro-3-yl-2(1H)-pyridone nucleobase
  modified_base order(7,9..10,15,18,20,22): mod_base = OTHER; note = 2-Prime-Fluoro modified nucleoside
  modified_base order(3..6,8,14,17,19,21,23..26): mod_base = OTHER; note = 2-Prime-O-Methyl modified nucleoside
  modified_base order(1^2,25^26): mod_base = OTHER; note = (1,3-dimethylimidazolidin-2-ylidene) Phosphoramidate linkage
  modified_base order(3..11,12^13,15..25): mod_base = OTHER; note = Phosphorothioate linkage
  modified_base 13^14: mod_base = OTHER; note = Methylphosphonate linkage
  modified_base 13: mod_base = m5u; note = 5-methyluridine
  misc_feature 1..26: note = RM107704
acctctgaggantgggttcatttttc

SEQ ID NO: 1069 - DNA, 24 bp, synthetic construct
  source 1..24: mol_type = other DNA
  misc_feature 11..12: note = DNA
  misc_feature order(1..10,13..24): note = RNA
  modified_base order(10,15): mod_base = OTHER; note = 2-Prime-O-Methoxyethyl modified nucleoside
  modified_base 1: mod_base = OTHER; note = 2-Prime-O-Methoxyethyl modified 5-methyl Cytidine
  modified_base 11: mod_base = OTHER; note = DNA nucleotide carrying a 6-amino-5-nitro-3-yl-2(1H)-pyridone nucleobase
  modified_base order(4..9,14,16..21): mod_base = OTHER; note = 2-Prime-Fluoro modified nucleoside
  modified_base order(2..3,13,22..24): mod_base = OTHER; note = 2-Prime-O-Methyl modified nucleoside
  modified_base order(1^2,23^24): mod_base = OTHER; note = (1,3-dimethylimidazolidin-2-ylidene) Phosphoramidate linkage
  modified_base order(2..10,11^12,14..23): mod_base = OTHER; note = Phosphorothioate linkage
  modified_base 12^13: mod_base = OTHER; note = Methylphosphonate linkage
  modified_base 12: mod_base = m5u; note = 5-methyluridine
  misc_feature 1..24: note = RM107261
cctctgaggantgggttcattttt

SEQ ID NO: 1070 - DNA, 20 bp, synthetic construct
  source 1..20: mol_type = other DNA
attattggggttggggagga

SEQ ID NO: 1071 - DNA, 22 bp, synthetic construct
  source 1..22: mol_type = other DNA
ccaacaccttgtaggtaagtga

SEQ ID NO: 1072 - DNA, 18 bp, synthetic construct
  source 1..18: mol_type = other DNA
  modified_base order(8..10,17): mod_base = OTHER; note = Locked Nucleic Acid
tgagcccagtcctcagag

SEQ ID NO: 1073 - DNA, 19 bp, synthetic construct
  source 1..19: mol_type = other DNA
  modified_base order(2,4,9..11,18): mod_base = OTHER; note = Locked Nucleic Acid
atgagcccaatcctcagag

SEQ ID NO: 1074 - DNA, 17 bp, synthetic construct
  source 1..17: mol_type = other DNA
ggctgtattcccctcca

SEQ ID NO: 1075 - DNA, 20 bp, synthetic construct
  source 1..20: mol_type = other DNA
gttcaatggggtacttcagg

SEQ ID NO: 1076 - DNA, 21 bp, synthetic construct
  source 1..21: mol_type = other DNA
aggagtccccgctgctcgttg

SEQ ID NO: 1077 - DNA, 25 bp, synthetic construct
  source 1..25: mol_type = other DNA
  modified_base order(5,8,11,16,25): mod_base = OTHER; note = Locked Nucleic Acid
acatttttaacaggtttgaccggat

SEQ ID NO: 1078 - DNA, 26 bp, synthetic construct
  source 1..26: mol_type = other DNA
  misc_feature 12..14: note = DNA
  misc_feature order(1..11,15..26): note = RNA
  modified_base order(1..2,17): mod_base = OTHER; note = 2-Prime-O-Methoxyethyl modified nucleoside
  modified_base 3: mod_base = OTHER; note = 2-Prime-O-Methoxyethyl modified 5-methyl Cytidine
  modified_base 13: mod_base = OTHER; note = DNA nucleotide carrying a 6-amino-5-nitro-3-yl-2(1H)-pyridone nucleobase
  modified_base order(6..11,16,18..23): mod_base = OTHER; note = 2-Prime-Fluoro modified nucleoside
  modified_base order(4..5,15,24..26): mod_base = OTHER; note = 2-Prime-O-Methyl modified nucleoside
  modified_base order(1^2,25^26): mod_base = OTHER; note = (1,3-dimethylimidazolidin-2-ylidene) Phosphoramidate linkage
  modified_base order(4..14,16..25): mod_base = OTHER; note = Phosphorothioate linkage
  modified_base 14^15: mod_base = OTHER; note = Methylphosphonate linkage
  modified_base 14: mod_base = m5u; note = 5-methyluridine
  misc_feature 1..26: note = RM107684
aacctctgaggantgggttcattttt

SEQ ID NO: 1079 - DNA, 26 bp, synthetic construct
  source 1..26: mol_type = other DNA
  misc_feature 12..14: note = DNA
  misc_feature order(1..11,15..26): note = RNA
  modified_base order(1..2,17): mod_base = OTHER; note = 2-Prime-O-Methoxyethyl modified nucleoside
  modified_base 3: mod_base = OTHER; note = 2-Prime-O-Methoxyethyl modified 5-methyl Cytidine
  modified_base 13: mod_base = OTHER; note = DNA nucleotide carrying a 6-amino-5-nitro-3-yl-2(1H)-pyridone nucleobase
  modified_base order(6..11,16,18..23): mod_base = OTHER; note = 2-Prime-Fluoro modified nucleoside
  modified_base order(4..5,15,24..26): mod_base = OTHER; note = 2-Prime-O-Methyl modified nucleoside
  modified_base order(1^2,25^26): mod_base = OTHER; note = (1,3-dimethylimidazolidin-2-ylidene) Phosphoramidate linkage
  modified_base order(4..14,16..25): mod_base = OTHER; note = Phosphorothioate linkage
  modified_base 14^15: mod_base = OTHER; note = Mesylphosphoramidate linkage
  modified_base 14: mod_base = m5u; note = 5-methyluridine
  misc_feature 1..26: note = RM107685
aacctctgaggantgggttcattttt

SEQ ID NO: 1080 - DNA, 26 bp, synthetic construct
  source 1..26: mol_type = other DNA
  misc_feature 13..14: note = DNA
  misc_feature order(1..12,15..26): note = RNA
  modified_base order(1..2,12,17): mod_base = OTHER; note = 2-Prime-O-Methoxyethyl modified nucleoside
  modified_base 3: mod_base = OTHER; note = 2-Prime-O-Methoxyethyl modified 5-methyl Cytidine
  modified_base 13: mod_base = OTHER; note = DNA nucleotide carrying a 6-amino-5-nitro-3-yl-2(1H)-pyridone nucleobase
  modified_base order(6..11,16,18..23): mod_base = OTHER; note = 2-Prime-Fluoro modified nucleoside
  modified_base order(4..5,15,24..26): mod_base = OTHER; note = 2-Prime-O-Methyl modified nucleoside
  modified_base order(1^2,14^15,25^26): mod_base = OTHER; note = (1,3-dimethylimidazolidin-2-ylidene) Phosphoramidate linkage
  modified_base order(4..12,13^14,16..25): mod_base = OTHER; note = Phosphorothioate linkage
  modified_base 14: mod_base = m5u; note = 5-methyluridine
  misc_feature 1..26: note = RM107686
aacctctgaggantgggttcattttt

SEQ ID NO: 1081 - DNA, 26 bp, synthetic construct
  source 1..26: mol_type = other DNA
  misc_feature 13..14: note = DNA
  misc_feature order(1..12,15..26): note = RNA
  modified_base order(1..2,12,17): mod_base = OTHER; note = 2-Prime-O-Methoxyethyl modified nucleoside
  modified_base 3: mod_base = OTHER; note = 2-Prime-O-Methoxyethyl modified 5-methyl Cytidine
  modified_base 13: mod_base = OTHER; note = DNA nucleotide carrying a 6-amino-5-nitro-3-yl-2(1H)-pyridone nucleobase
  modified_base order(6..11,16,18..23): mod_base = OTHER; note = 2-Prime-Fluoro modified nucleoside
  modified_base order(4..5,15,24..26): mod_base = OTHER; note = 2-Prime-O-Methyl modified nucleoside
  modified_base order(1^2,25^26): mod_base = OTHER; note = (1,3-dimethylimidazolidin-2-ylidene) Phosphoramidate linkage
  modified_base order(4..12,13^14,16..25): mod_base = OTHER; note = Phosphorothioate linkage
  modified_base 14^15: mod_base = OTHER; note = Mesylphosphoramidate linkage
  modified_base 14: mod_base = m5u; note = 5-methyluridine
  misc_feature 1..26: note = RM107687
aacctctgaggantgggttcattttt

SEQ ID NO: 1082 - DNA, 26 bp, synthetic construct
  source 1..26: mol_type = other DNA
  misc_feature 12..14: note = DNA
  misc_feature order(1..11,15..26): note = RNA
  modified_base order(1..2,17): mod_base = OTHER; note = 2-Prime-O-Methoxyethyl modified nucleoside
  modified_base 3: mod_base = OTHER; note = 2-Prime-O-Methoxyethyl modified 5-methyl Cytidine
  modified_base 13: mod_base = OTHER; note = DNA nucleotide carrying a 6-amino-5-nitro-3-yl-2(1H)-pyridone nucleobase
  modified_base order(6..11,16,18..23): mod_base = OTHER; note = 2-Prime-Fluoro modified nucleoside
  modified_base order(4..5,15,24..26): mod_base = OTHER; note = 2-Prime-O-Methyl modified nucleoside
  modified_base order(1^2,14^15,25^26): mod_base = OTHER; note = (1,3-dimethylimidazolidin-2-ylidene) Phosphoramidate linkage
  modified_base order(4..14,16..25): mod_base = OTHER; note = Phosphorothioate linkage
  modified_base 14: mod_base = m5u; note = 5-methyluridine
  misc_feature 1..26: note = RM107688
aacctctgaggantgggttcattttt

SEQ ID NO: 1083 - DNA, 26 bp, synthetic construct
  source 1..26: mol_type = other DNA
  misc_feature 12..14: note = DNA
  misc_feature order(1..11,15..26): note = RNA
  modified_base order(2,17): mod_base = OTHER; note = 2-Prime-O-Methoxyethyl modified nucleoside
  modified_base 3: mod_base = OTHER; note = 2-Prime-O-Methoxyethyl modified 5-methyl Cytidine
  modified_base 13: mod_base = OTHER; note = DNA nucleotide carrying a 6-amino-5-nitro-3-yl-2(1H)-pyridone nucleobase
  modified_base order(1,8,10..11,16,19,21,23): mod_base = OTHER; note = 2-Prime-Fluoro modified nucleoside
  modified_base order(4..7,9,15,18,20,22,24..26): mod_base = OTHER; note = 2-Prime-O-Methyl modified nucleoside
  modified_base order(1^2,25^26): mod_base = OTHER; note = (1,3-dimethylimidazolidin-2-ylidene) Phosphoramidate linkage
  modified_base order(4..14,16..25): mod_base = OTHER; note = Phosphorothioate linkage
  modified_base 14^15: mod_base = OTHER; note = Methylphosphonate linkage
  modified_base 14: mod_base = m5u; note = 5-methyluridine
  misc_feature 1..26: note = RM107690
aacctctgaggantgggttcattttt

SEQ ID NO: 1084 - DNA, 26 bp, synthetic construct
  source 1..26: mol_type = other DNA
  misc_feature 12..14: note = DNA
  misc_feature order(1..11,15..26): note = RNA
  modified_base order(2,17): mod_base = OTHER; note = 2-Prime-O-Methoxyethyl modified nucleoside
  modified_base 3: mod_base = OTHER; note = 2-Prime-O-Methoxyethyl modified 5-methyl Cytidine
  modified_base 13: mod_base = OTHER; note = DNA nucleotide carrying a 6-amino-5-nitro-3-yl-2(1H)-pyridone nucleobase
  modified_base order(1,8,10..11,16,19,21,23): mod_base = OTHER; note = 2-Prime-Fluoro modified nucleoside
  modified_base order(4..7,9,15,18,20,22,24..26): mod_base = OTHER; note = 2-Prime-O-Methyl modified nucleoside
  modified_base order(1^2,25^26): mod_base = OTHER; note = (1,3-dimethylimidazolidin-2-ylidene) Phosphoramidate linkage
  modified_base order(4..14,16..25): mod_base = OTHER; note = Phosphorothioate linkage
  modified_base 14^15: mod_base = OTHER; note = Mesylphosphoramidate linkage
  modified_base 14: mod_base = m5u; note = 5-methyluridine
  misc_feature 1..26: note = RM107691
aacctctgaggantgggttcattttt

SEQ ID NO: 1085 - DNA, 26 bp, synthetic construct
  source 1..26: mol_type = other DNA
  misc_feature 13..14: note = DNA
  misc_feature order(1..12,15..26): note = RNA
  modified_base order(2,12,17): mod_base = OTHER; note = 2-Prime-O-Methoxyethyl modified nucleoside
  modified_base 3: mod_base = OTHER; note = 2-Prime-O-Methoxyethyl modified 5-methyl Cytidine
  modified_base 13: mod_base = OTHER; note = DNA nucleotide carrying a 6-amino-5-nitro-3-yl-2(1H)-pyridone nucleobase
  modified_base order(1,8,10..11,16,19,21,23): mod_base = OTHER; note = 2-Prime-Fluoro modified nucleoside
  modified_base order(4..7,9,15,18,20,22,24..26): mod_base = OTHER; note = 2-Prime-O-Methyl modified nucleoside
  modified_base order(1^2,14^15,25^26): mod_base = OTHER; note = (1,3-dimethylimidazolidin-2-ylidene) Phosphoramidate linkage
  modified_base order(4..12,13^14,16..25): mod_base = OTHER; note = Phosphorothioate linkage
  modified_base 14: mod_base = m5u; note = 5-methyluridine
  misc_feature 1..26: note = RM107692
aacctctgaggantgggttcattttt

SEQ ID NO: 1086 - DNA, 26 bp, synthetic construct
  source 1..26: mol_type = other DNA
  misc_feature 13..14: note = DNA
  misc_feature order(1..12,15..26): note = RNA
  modified_base order(2,12,17): mod_base = OTHER; note = 2-Prime-O-Methoxyethyl modified nucleoside
  modified_base 3: mod_base = OTHER; note = 2-Prime-O-Methoxyethyl modified 5-methyl Cytidine
  modified_base 13: mod_base = OTHER; note = DNA nucleotide carrying a 6-amino-5-nitro-3-yl-2(1H)-pyridone nucleobase
  modified_base order(1,8,10..11,16,19,21,23): mod_base = OTHER; note = 2-Prime-Fluoro modified nucleoside
  modified_base order(4..7,9,15,18,20,22,24..26): mod_base = OTHER; note = 2-Prime-O-Methyl modified nucleoside
  modified_base order(1^2,25^26): mod_base = OTHER; note = (1,3-dimethylimidazolidin-2-ylidene) Phosphoramidate linkage
  modified_base order(4..12,13^14,16..25): mod_base = OTHER; note = Phosphorothioate linkage
  modified_base 14^15: mod_base = OTHER; note = Mesylphosphoramidate linkage
  modified_base 14: mod_base = m5u; note = 5-methyluridine
  misc_feature 1..26: note = RM107693
aacctctgaggantgggttcattttt

SEQ ID NO: 1087 - DNA, 26 bp, synthetic construct
  source 1..26: mol_type = other DNA
  misc_feature 12..14: note = DNA
  misc_feature order(1..11,15..26): note = RNA
  modified_base order(2,17): mod_base = OTHER; note = 2-Prime-O-Methoxyethyl modified nucleoside
  modified_base 3: mod_base = OTHER; note = 2-Prime-O-Methoxyethyl modified 5-methyl Cytidine
  modified_base 13: mod_base = OTHER; note = DNA nucleotide carrying a 6-amino-5-nitro-3-yl-2(1H)-pyridone nucleobase
  modified_base order(1,8,10..11,16,19,21,23): mod_base = OTHER; note = 2-Prime-Fluoro modified nucleoside
  modified_base order(4..7,9,15,18,20,22,24..26): mod_base = OTHER; note = 2-Prime-O-Methyl modified nucleoside
  modified_base order(1^2,14^15,25^26): mod_base = OTHER; note = (1,3-dimethylimidazolidin-2-ylidene) Phosphoramidate linkage
  modified_base order(4..14,16..25): mod_base = OTHER; note = Phosphorothioate linkage
  modified_base 14: mod_base = m5u; note = 5-methyluridine
  misc_feature 1..26: note = RM107694
aacctctgaggantgggttcattttt

SEQ ID NO: 1088 - DNA, 30 bp, synthetic construct; identical to SEQ ID NO: 23
  source 1..30: mol_type = other DNA
  misc_feature 17..18: note = DNA
  misc_feature order(1..16,19..30): note = RNA
  modified_base order(1,4,16,21): mod_base = OTHER; note = 2-Prime-O-Methoxyethyl modified nucleoside
  modified_base 3: mod_base = OTHER; note = 2-Prime-O-Methoxyethyl modified 5-methyl Cytidine
  modified_base 2: mod_base = OTHER; note = 2-Prime-O-Methoxyethyl modified 5-methyl Uridine
  modified_base 17: mod_base = OTHER; note = DNA nucleotide carrying a 6-amino-5-nitro-3-yl-2(1H)-pyridone nucleobase
  modified_base order(5,12,14..15,20,23,25,27): mod_base = OTHER; note = 2-Prime-Fluoro modified nucleoside
  modified_base order(6..11,13,19,22,24,26,28..30): mod_base = OTHER; note = 2-Prime-O-Methyl modified nucleoside
  modified_base order(1^2,29^30): mod_base = OTHER; note = (1,3-dimethylimidazolidin-2-ylidene) Phosphoramidate linkage
  modified_base order(6..18,20..29): mod_base = OTHER; note = Phosphorothioate linkage
  modified_base 18^19: mod_base = OTHER; note = Methylphosphonate linkage
  modified_base 18: mod_base = m5u; note = 5-methyluridine
  misc_feature 1..30: note = RM107695

SEQ ID NO: 1089 - DNA, 30 bp, synthetic construct; identical to SEQ ID NO: 23
  source 1..30: mol_type = other DNA
  misc_feature 16..18: note = DNA
  misc_feature order(1..15,19..30): note = RNA
  modified_base order(1,4,21): mod_base = OTHER; note = 2-Prime-O-Methoxyethyl modified nucleoside
  modified_base 3: mod_base = OTHER; note = 2-Prime-O-Methoxyethyl modified 5-methyl Cytidine
  modified_base 2: mod_base = OTHER; note = 2-Prime-O-Methoxyethyl modified 5-methyl Uridine
  modified_base 17: mod_base = OTHER; note = DNA nucleotide carrying a 6-amino-5-nitro-3-yl-2(1H)-pyridone nucleobase
  modified_base order(5,12,14..15,20,23,25,27): mod_base = OTHER; note = 2-Prime-Fluoro modified nucleoside
  modified_base order(6..11,13,19,22,24,26,28..30): mod_base = OTHER; note = 2-Prime-O-Methyl modified nucleoside
  modified_base order(1^2,29^30): mod_base = OTHER; note = (1,3-dimethylimidazolidin-2-ylidene) Phosphoramidate linkage
  modified_base order(6..18,20..29): mod_base = OTHER; note = Phosphorothioate linkage
  modified_base 18^19: mod_base = OTHER; note = Methylphosphonate linkage
  modified_base 18: mod_base = m5u; note = 5-methyluridine
  misc_feature 1..30: note = RM107696

SEQ ID NO: 1090 - DNA, 30 bp, synthetic construct; identical to SEQ ID NO: 23
  source 1..30: mol_type = other DNA
  misc_feature 16..18: note = DNA
  misc_feature order(1..15,19..30): note = RNA
  modified_base order(1,4,21): mod_base = OTHER; note = 2-Prime-O-Methoxyethyl modified nucleoside
  modified_base 3: mod_base = OTHER; note = 2-Prime-O-Methoxyethyl modified 5-methyl Cytidine
  modified_base 2: mod_base = OTHER; note = 2-Prime-O-Methoxyethyl modified 5-methyl Uridine
  modified_base 17: mod_base = OTHER; note = DNA nucleotide carrying a 6-amino-5-nitro-3-yl-2(1H)-pyridone nucleobase
  modified_base order(5,12,14..15,20,23,25,27): mod_base = OTHER; note = 2-Prime-Fluoro modified nucleoside
  modified_base order(6..11,13,19,22,24,26,28..30): mod_base = OTHER; note = 2-Prime-O-Methyl modified nucleoside
  modified_base order(1^2,29^30): mod_base = OTHER; note = (1,3-dimethylimidazolidin-2-ylidene) Phosphoramidate linkage
  modified_base order(6..18,20..29): mod_base = OTHER; note = Phosphorothioate linkage
  modified_base 18^19: mod_base = OTHER; note = Mesylphosphoramidate linkage
  modified_base 18: mod_base = m5u; note = 5-methyluridine
  misc_feature 1..30: note = RM107697

SEQ ID NO: 1091 - DNA, 30 bp, synthetic construct; identical to SEQ ID NO: 23
  source 1..30: mol_type = other DNA
  misc_feature 17..18: note = DNA
  misc_feature order(1..16,19..30): note = RNA
  modified_base order(1,4,16,21): mod_base = OTHER; note = 2-Prime-O-Methoxyethyl modified nucleoside
  modified_base 3: mod_base = OTHER; note = 2-Prime-O-Methoxyethyl modified 5-methyl Cytidine
  modified_base 2: mod_base = OTHER; note = 2-Prime-O-Methoxyethyl modified 5-methyl Uridine
  modified_base 17: mod_base = OTHER; note = DNA nucleotide carrying a 6-amino-5-nitro-3-yl-2(1H)-pyridone nucleobase
  modified_base order(5,12,14..15,20,23,25,27): mod_base = OTHER; note = 2-Prime-Fluoro modified nucleoside
  modified_base order(6..11,13,19,22,24,26,28..30): mod_base = OTHER; note = 2-Prime-O-Methyl modified nucleoside
  modified_base order(1^2,18^19,29^30): mod_base = OTHER; note = (1,3-dimethylimidazolidin-2-ylidene) Phosphoramidate linkage
  modified_base order(6..16,17^18,20..29): mod_base = OTHER; note = Phosphorothioate linkage
  modified_base 18: mod_base = m5u; note = 5-methyluridine
  misc_feature 1..30: note = RM107698

SEQ ID NO: 1092 - DNA, 30 bp, synthetic construct; identical to SEQ ID NO: 23
  source 1..30: mol_type = other DNA
  misc_feature 17..18: note = DNA
  misc_feature order(1..16,19..30): note = RNA
  modified_base order(1,4,16,21): mod_base = OTHER; note = 2-Prime-O-Methoxyethyl modified nucleoside
  modified_base 3: mod_base = OTHER; note = 2-Prime-O-Methoxyethyl modified 5-methyl Cytidine
  modified_base 2: mod_base = OTHER; note = 2-Prime-O-Methoxyethyl modified 5-methyl Uridine
  modified_base 17: mod_base = OTHER; note = DNA nucleotide carrying a 6-amino-5-nitro-3-yl-2(1H)-pyridone nucleobase
  modified_base order(5,12,14..15,20,23,25,27): mod_base = OTHER; note = 2-Prime-Fluoro modified nucleoside
  modified_base order(6..11,13,19,22,24,26,28..30): mod_base = OTHER; note = 2-Prime-O-Methyl modified nucleoside
  modified_base order(1^2,29^30): mod_base = OTHER; note = (1,3-dimethylimidazolidin-2-ylidene) Phosphoramidate linkage
  modified_base order(6..16,17^18,20..29): mod_base = OTHER; note = Phosphorothioate linkage
  modified_base 18^19: mod_base = OTHER; note = Mesylphosphoramidate linkage
  modified_base 18: mod_base = m5u; note = 5-methyluridine
  misc_feature 1..30: note = RM107699

SEQ ID NO: 1093 - DNA, 30 bp, synthetic construct; identical to SEQ ID NO: 23
  source 1..30: mol_type = other DNA
  misc_feature 16..18: note = DNA
  misc_feature order(1..15,19..30): note = RNA
  modified_base order(1,4,21): mod_base = OTHER; note = 2-Prime-O-Methoxyethyl modified nucleoside
  modified_base 3: mod_base = OTHER; note = 2-Prime-O-Methoxyethyl modified 5-methyl Cytidine
  modified_base 2: mod_base = OTHER; note = 2-Prime-O-Methoxyethyl modified 5-methyl Uridine
  modified_base 17: mod_base = OTHER; note = DNA nucleotide carrying a 6-amino-5-nitro-3-yl-2(1H)-pyridone nucleobase
  modified_base order(5,12,14..15,20,23,25,27): mod_base = OTHER; note = 2-Prime-Fluoro modified nucleoside
  modified_base order(6..11,13,19,22,24,26,28..30): mod_base = OTHER; note = 2-Prime-O-Methyl modified nucleoside
  modified_base order(1^2,18^19,29^30): mod_base = OTHER; note = (1,3-dimethylimidazolidin-2-ylidene) Phosphoramidate linkage
  modified_base order(6..18,20..29): mod_base = OTHER; note = Phosphorothioate linkage
  modified_base 18: mod_base = m5u; note = 5-methyluridine
  misc_feature 1..30: note = RM107700

SEQ ID NO: 1094 - DNA, 24 bp, synthetic construct
  source 1..24: mol_type = other DNA
  misc_feature 12..13: note = DNA
  misc_feature order(1..11,14..24): note = RNA
  modified_base order(1,11,16): mod_base = OTHER; note = 2-Prime-O-Methoxyethyl modified nucleoside
  modified_base 2: mod_base = OTHER; note = 2-Prime-O-Methoxyethyl modified 5-methyl Cytidine
  modified_base 12: mod_base = OTHER; note = DNA nucleotide carrying a 6-amino-5-nitro-3-yl-2(1H)-pyridone nucleobase
  modified_base order(7,9..10,15,18,20,22): mod_base = OTHER; note = 2-Prime-Fluoro modified nucleoside
  modified_base order(3..6,8,14,17,19,21,23..24): mod_base = OTHER; note = 2-Prime-O-Methyl modified nucleoside
  modified_base order(1^2,23^24): mod_base = OTHER; note = (1,3-dimethylimidazolidin-2-ylidene) Phosphoramidate linkage
  modified_base order(3..11,12^13,15..23): mod_base = OTHER; note = Phosphorothioate linkage
  modified_base 13^14: mod_base = OTHER; note = Methylphosphonate linkage
  modified_base 13: mod_base = m5u; note = 5-methyluridine
  misc_feature 1..24: note = RM107701
acctctgaggantgggttcatttt

SEQ ID NO: 1095 - DNA, 22 bp, synthetic construct
  source 1..22: mol_type = other DNA
  misc_feature 11..12: note = DNA
  misc_feature order(1..10,13..22): note = RNA
  modified_base order(10,15): mod_base = OTHER; note = 2-Prime-O-Methoxyethyl modified nucleoside
  modified_base 1: mod_base = OTHER; note = 2-Prime-O-Methoxyethyl modified 5-methyl Cytidine
  modified_base 11: mod_base = OTHER; note = DNA nucleotide carrying a 6-amino-5-nitro-3-yl-2(1H)-pyridone nucleobase
  modified_base order(6,8..9,14,17,19,21): mod_base = OTHER; note = 2-Prime-Fluoro modified nucleoside
  modified_base order(2..5,7,13,16,18,20,22): mod_base = OTHER; note = 2-Prime-O-Methyl modified nucleoside
  modified_base order(1^2,21^22): mod_base = OTHER; note = (1,3-dimethylimidazolidin-2-ylidene) Phosphoramidate linkage
  modified_base order(2..10,11^12,14..21): mod_base = OTHER; note = Phosphorothioate linkage
  modified_base 12^13: mod_base = OTHER; note = Methylphosphonate linkage
  modified_base 12: mod_base = m5u; note = 5-methyluridine
  misc_feature 1..22: note = RM107702
cctctgaggantgggttcattt

SEQ ID NO: 1096 - DNA, 20 bp, synthetic construct
  source 1..20: mol_type = other DNA
  misc_feature 10..11: note = DNA
  misc_feature order(1..9,12..20): note = RNA
  modified_base order(9,14): mod_base = OTHER; note = 2-Prime-O-Methoxyethyl modified nucleoside
  modified_base 10: mod_base = OTHER; note = DNA nucleotide carrying a 6-amino-5-nitro-3-yl-2(1H)-pyridone nucleobase
  modified_base order(5,7..8,13,16,18,20): mod_base = OTHER; note = 2-Prime-Fluoro modified nucleoside
  modified_base order(1..4,6,12,15,17,19): mod_base = OTHER; note = 2-Prime-O-Methyl modified nucleoside
  modified_base order(1^2,19^20): mod_base = OTHER; note = (1,3-dimethylimidazolidin-2-ylidene) Phosphoramidate linkage
  modified_base order(2..9,10^11,13..19): mod_base = OTHER; note = Phosphorothioate linkage
  modified_base 11^12: mod_base = OTHER; note = Methylphosphonate linkage
  modified_base 11: mod_base = m5u; note = 5-methyluridine
  misc_feature 1..20: note = RM107703
ctctgaggantgggttcatt

SEQ ID NO: 1097 - DNA, 26 bp, synthetic construct
  source 1..26: mol_type = other DNA
  misc_feature 12..13: note = DNA
  misc_feature order(1..11,14..26): note = RNA
  modified_base order(1,11,16): mod_base = OTHER; note = 2-Prime-O-Methoxyethyl modified nucleoside
  modified_base 2: mod_base = OTHER; note = 2-Prime-O-Methoxyethyl modified 5-methyl Cytidine
  modified_base 12: mod_base = OTHER; note = DNA nucleotide carrying a 6-amino-5-nitro-3-yl-2(1H)-pyridone nucleobase
  modified_base order(7,9..10,15,18,20,22): mod_base = OTHER; note = 2-Prime-Fluoro modified nucleoside
  modified_base order(3..6,8,14,17,19,21,23..26): mod_base = OTHER; note = 2-Prime-O-Methyl modified nucleoside
  modified_base order(1^2,25^26): mod_base = OTHER; note = (1,3-dimethylimidazolidin-2-ylidene) Phosphoramidate linkage
  modified_base order(3..11,12^13,15..25): mod_base = OTHER; note = Phosphorothioate linkage
  modified_base 13^14: mod_base = OTHER; note = Methylphosphonate linkage
  modified_base 13: mod_base = m5u; note = 5-methyluridine
  misc_feature 1..26: note = RM107704
acctctgaggantgggttcatttttc

SEQ ID NO: 1098 - DNA, 26 bp, synthetic construct
  source 1..26: mol_type = other DNA
  misc_feature 14..15: note = DNA
  misc_feature order(1..13,16..26): note = RNA
  modified_base order(1,3,13,18): mod_base = OTHER; note = 2-Prime-O-Methoxyethyl modified nucleoside
  modified_base 4: mod_base = OTHER; note = 2-Prime-O-Methoxyethyl modified 5-methyl Cytidine
  modified_base 14: mod_base = OTHER; note = DNA nucleotide carrying a 6-amino-5-nitro-3-yl-2(1H)-pyridone nucleobase
  modified_base order(2,9,11..12,17,20,22,24): mod_base = OTHER; note = 2-Prime-Fluoro modified nucleoside
  modified_base order(5..8,10,16,19,21,23,25..26): mod_base = OTHER; note = 2-Prime-O-Methyl modified nucleoside
  modified_base order(1^2,25^26): mod_base = OTHER; note = (1,3-dimethylimidazolidin-2-ylidene) Phosphoramidate linkage
  modified_base order(5..13,14^15,17..25): mod_base = OTHER; note = Phosphorothioate linkage
  modified_base 15^16: mod_base = OTHER; note = Methylphosphonate linkage
  modified_base 15: mod_base = m5u; note = 5-methyluridine
  misc_feature 1..26: note = RM107705
aaacctctgaggantgggttcatttt

SEQ ID NO: 1099 - DNA, 30 bp, synthetic construct; identical to SEQ ID NO: 23
  source 1..30: mol_type = other DNA
  misc_feature 17..18: note = DNA
  misc_feature order(1..16,19..30): note = RNA
  modified_base order(1,4,16,21): mod_base = OTHER; note = 2-Prime-O-Methoxyethyl modified nucleoside
  modified_base 3: mod_base = OTHER; note = 2-Prime-O-Methoxyethyl modified 5-methyl Cytidine
  modified_base 2: mod_base = OTHER; note = 2-Prime-O-Methoxyethyl modified 5-methyl Uridine
  modified_base 17: mod_base = OTHER; note = DNA nucleotide carrying a 6-amino-5-nitro-3-yl-2(1H)-pyridone nucleobase
  modified_base order(5,12,14..15,20,23,25,27): mod_base = OTHER; note = 2-Prime-Fluoro modified nucleoside
  modified_base order(6..11,13,19,22,24,26,28..30): mod_base = OTHER; note = 2-Prime-O-Methyl modified nucleoside
  modified_base order(1^2,29^30): mod_base = OTHER; note = (1,3-dimethylimidazolidin-2-ylidene) Phosphoramidate linkage
  modified_base order(8..18,20..29): mod_base = OTHER; note = Phosphorothioate linkage
  modified_base 18^19: mod_base = OTHER; note = Methylphosphonate linkage
  modified_base 18: mod_base = m5u; note = 5-methyluridine
  misc_feature 1..30: note = RM107706

SEQ ID NO: 1100 - DNA, 26 bp, synthetic construct
  source 1..26: mol_type = other DNA
  misc_feature 13..14: note = DNA
  misc_feature order(1..12,15..26): note = RNA
  modified_base order(1..2,12,17): mod_base = OTHER; note = 2-Prime-O-Methoxyethyl modified nucleoside
  modified_base 3: mod_base = OTHER; note = 2-Prime-O-Methoxyethyl modified 5-methyl Cytidine
  modified_base 13: mod_base = OTHER; note = DNA nucleotide carrying a 6-amino-5-nitro-3-yl-2(1H)-pyridone nucleobase
  modified_base order(6..11,16,18..23): mod_base = OTHER; note = 2-Prime-Fluoro modified nucleoside
  modified_base order(4..5,15,24..26): mod_base = OTHER; note = 2-Prime-O-Methyl modified nucleoside
  modified_base order(1^2,25^26): mod_base = OTHER; note = (1,3-dimethylimidazolidin-2-ylidene) Phosphoramidate linkage
  modified_base order(4..12,13^14,16..25): mod_base = OTHER; note = Phosphorothioate linkage
  modified_base 14^15: mod_base = OTHER; note = Methylphosphonate linkage
  modified_base 14: mod_base = m5u; note = 5-methyluridine
  misc_feature 1..26: note = RM106564
aacctctgaggantgggttcattttt

SEQ ID NO: 1101 - DNA, 26 bp, synthetic construct
  source 1..26: mol_type = other DNA
  misc_feature 13..14: note = DNA
  misc_feature order(1..12,15..26): note = RNA
  modified_base order(1..2,12,17): mod_base = OTHER; note = 2-Prime-O-Methoxyethyl modified nucleoside
  modified_base 3: mod_base = OTHER; note = 2-Prime-O-Methoxyethyl modified 5-methyl Cytidine
  modified_base 13: mod_base = OTHER; note = DNA nucleotide carrying a 6-amino-5-nitro-3-yl-2(1H)-pyridone nucleobase
  modified_base 16: mod_base = OTHER; note = 2-Prime-Fluoro modified nucleoside
  modified_base order(4..11,15,18..26): mod_base = OTHER; note = 2-Prime-O-Methyl modified nucleoside
  modified_base order(1^2,25^26): mod_base = OTHER; note = (1,3-dimethylimidazolidin-2-ylidene) Phosphoramidate linkage
  modified_base order(4..12,13^14,16..25): mod_base = OTHER; note = Phosphorothioate linkage
  modified_base 14^15: mod_base = OTHER; note = Methylphosphonate linkage
  modified_base 14: mod_base = m5u; note = 5-methyluridine
  misc_feature 1..26: note = RM106949
aacctctgaggantgggttcattttt

SEQ ID NO: 1102 - DNA, 26 bp, synthetic construct
  source 1..26: mol_type = other DNA
  misc_feature 13..14: note = DNA
  misc_feature order(1..12,15..26): note = RNA
  modified_base order(1..2,12,17): mod_base = OTHER; note = 2-Prime-O-Methoxyethyl modified nucleoside
  modified_base 3: mod_base = OTHER; note = 2-Prime-O-Methoxyethyl modified 5-methyl Cytidine
  modified_base 13: mod_base = OTHER; note = DNA nucleotide carrying a 6-amino-5-nitro-3-yl-2(1H)-pyridone nucleobase
  modified_base order(6..11,16,19,21,23): mod_base = OTHER; note = 2-Prime-Fluoro modified nucleoside
  modified_base order(4..5,15,18,20,22,24..26): mod_base = OTHER; note = 2-Prime-O-Methyl modified nucleoside
  modified_base order(1^2,25^26): mod_base = OTHER; note = (1,3-dimethylimidazolidin-2-ylidene) Phosphoramidate linkage
  modified_base order(4..12,13^14,16..25): mod_base = OTHER; note = Phosphorothioate linkage
  modified_base 14^15: mod_base = OTHER; note = Methylphosphonate linkage
  modified_base 14: mod_base = m5u; note = 5-methyluridine
  misc_feature 1..26: note = RM106950
aacctctgaggantgggttcattttt

SEQ ID NO: 1103 - DNA, 26 bp, synthetic construct
  source 1..26: mol_type = other DNA
  misc_feature 13..14: note = DNA
  misc_feature order(1..12,15..26): note = RNA
  modified_base order(1..2,12,17): mod_base = OTHER; note = 2-Prime-O-Methoxyethyl modified nucleoside
  modified_base 3: mod_base = OTHER; note = 2-Prime-O-Methoxyethyl modified 5-methyl Cytidine
  modified_base 13: mod_base = OTHER; note = DNA nucleotide carrying a 6-amino-5-nitro-3-yl-2(1H)-pyridone nucleobase
  modified_base order(6..11,16,19,21..23): mod_base = OTHER; note = 2-Prime-Fluoro modified nucleoside
  modified_base order(4..5,15,18,20,24..26): mod_base = OTHER; note = 2-Prime-O-Methyl modified nucleoside
  modified_base order(1^2,25^26): mod_base = OTHER; note = (1,3-dimethylimidazolidin-2-ylidene) Phosphoramidate linkage
  modified_base order(4..12,13^14,16..25): mod_base = OTHER; note = Phosphorothioate linkage
  modified_base 14^15: mod_base = OTHER; note = Methylphosphonate linkage
  modified_base 14: mod_base = m5u; note = 5-methyluridine
  misc_feature 1..26: note = RM106951
aacctctgaggantgggttcattttt

SEQ ID NO: 1104 - DNA, 26 bp, synthetic construct
  source 1..26: mol_type = other DNA
  misc_feature 13..14: note = DNA
  misc_feature order(1..12,15..26): note = RNA
  modified_base order(1..2,12,17): mod_base = OTHER; note = 2-Prime-O-Methoxyethyl modified nucleoside
  modified_base 3: mod_base = OTHER; note = 2-Prime-O-Methoxyethyl modified 5-methyl Cytidine
  modified_base 13: mod_base = OTHER; note = DNA nucleotide carrying a 6-amino-5-nitro-3-yl-2(1H)-pyridone nucleobase
  modified_base order(6..11,16,21..23): mod_base = OTHER; note = 2-Prime-Fluoro modified nucleoside
  modified_base order(4..5,15,18..20,24..26): mod_base = OTHER; note = 2-Prime-O-Methyl modified nucleoside
  modified_base order(1^2,25^26): mod_base = OTHER; note = (1,3-dimethylimidazolidin-2-ylidene) Phosphoramidate linkage
  modified_base order(4..12,13^14,16..25): mod_base = OTHER; note = Phosphorothioate linkage
  modified_base 14^15: mod_base = OTHER; note = Methylphosphonate linkage
  modified_base 14: mod_base = m5u; note = 5-methyluridine
  misc_feature 1..26: note = RM106952
aacctctgaggantgggttcattttt

SEQ ID NO: 1105 - DNA, 26 bp, synthetic construct
  source 1..26: mol_type = other DNA
  misc_feature 13..14: note = DNA
  misc_feature order(1..12,15..26): note = RNA
  modified_base order(1..2,12,17): mod_base = OTHER; note = 2-Prime-O-Methoxyethyl modified nucleoside
  modified_base 3: mod_base = OTHER; note = 2-Prime-O-Methoxyethyl modified 5-methyl Cytidine
  modified_base 13: mod_base = OTHER; note = DNA nucleotide carrying a 6-amino-5-nitro-3-yl-2(1H)-pyridone nucleobase
  modified_base order(6..11,16,21..24): mod_base = OTHER; note = 2-Prime-Fluoro modified nucleoside
  modified_base order(4..5,15,18..20,25..26): mod_base = OTHER; note = 2-Prime-O-Methyl modified nucleoside
  modified_base order(1^2,25^26): mod_base = OTHER; note = (1,3-dimethylimidazolidin-2-ylidene) Phosphoramidate linkage
  modified_base order(4..12,13^14,16..25): mod_base = OTHER; note = Phosphorothioate linkage
  modified_base 14^15: mod_base = OTHER; note = Methylphosphonate linkage
  modified_base 14: mod_base = m5u; note = 5-methyluridine
  misc_feature 1..26: note = RM106953
aacctctgaggantgggttcattttt

SEQ ID NO: 1106 - DNA, 26 bp, synthetic construct
  source 1..26: mol_type = other DNA
  misc_feature 13..14: note = DNA
  misc_feature order(1..12,15..26): note = RNA
  modified_base order(1..2,12,17): mod_base = OTHER; note = 2-Prime-O-Methoxyethyl modified nucleoside
  modified_base 3: mod_base = OTHER; note = 2-Prime-O-Methoxyethyl modified 5-methyl Cytidine
  modified_base 13: mod_base = OTHER; note = DNA nucleotide carrying a 6-amino-5-nitro-3-yl-2(1H)-pyridone nucleobase
  modified_base order(6,8,10,16,18..23): mod_base = OTHER; note = 2-Prime-Fluoro modified nucleoside
  modified_base order(4..5,7,9,11,15,24..26): mod_base = OTHER; note = 2-Prime-O-Methyl modified nucleoside
  modified_base order(1^2,25^26): mod_base = OTHER; note = (1,3-dimethylimidazolidin-2-ylidene) Phosphoramidate linkage
  modified_base order(4..12,13^14,16..25): mod_base = OTHER; note = Phosphorothioate linkage
  modified_base 14^15: mod_base = OTHER; note = Methylphosphonate linkage
  modified_base 14: mod_base = m5u; note = 5-methyluridine
  misc_feature 1..26: note = RM106954
aacctctgaggantgggttcattttt

SEQ ID NO: 1107 - DNA, 26 bp, synthetic construct
  source 1..26: mol_type = other DNA
  misc_feature 13..14: note = DNA
  misc_feature order(1..12,15..26): note = RNA
  modified_base order(1..2,12,17): mod_base = OTHER; note = 2-Prime-O-Methoxyethyl modified nucleoside
  modified_base 3: mod_base = OTHER; note = 2-Prime-O-Methoxyethyl modified 5-methyl Cytidine
  modified_base 13: mod_base = OTHER; note = DNA nucleotide carrying a 6-amino-5-nitro-3-yl-2(1H)-pyridone nucleobase
  modified_base order(6,8,16,18..23): mod_base = OTHER; note = 2-Prime-Fluoro modified nucleoside
  modified_base order(4..5,7,9..11,15,24..26): mod_base = OTHER; note = 2-Prime-O-Methyl modified nucleoside
  modified_base order(1^2,25^26): mod_base = OTHER; note = (1,3-dimethylimidazolidin-2-ylidene) Phosphoramidate linkage
  modified_base order(4..12,13^14,16..25): mod_base = OTHER; note = Phosphorothioate linkage
  modified_base 14^15: mod_base = OTHER; note = Methylphosphonate linkage
  modified_base 14: mod_base = m5u; note = 5-methyluridine
  misc_feature 1..26: note = RM106955
aacctctgaggantgggttcattttt

SEQ ID NO: 1108 - DNA, 26 bp, synthetic construct
  source 1..26: mol_type = other DNA
  misc_feature 13..14: note = DNA
  misc_feature order(1..12,15..26): note = RNA
  modified_base order(1..2,12,17): mod_base = OTHER; note = 2-Prime-O-Methoxyethyl modified nucleoside
  modified_base 3: mod_base = OTHER; note = 2-Prime-O-Methoxyethyl modified 5-methyl Cytidine
  modified_base 13: mod_base = OTHER; note = DNA nucleotide carrying a 6-amino-5-nitro-3-yl-2(1H)-pyridone nucleobase
  modified_base order(6,8,10,16,18..23): mod_base = OTHER; note = 2-Prime-Fluoro modified nucleoside
  modified_base order(4..5,7,9,11,15,24..26): mod_base = OTHER; note = 2-Prime-O-Methyl modified nucleoside
  modified_base order(1^2,25^26): mod_base = OTHER; note = (1,3-dimethylimidazolidin-2-ylidene) Phosphoramidate linkage
  modified_base order(4..12,13^14,16..25): mod_base = OTHER; note = Phosphorothioate linkage
  modified_base 14^15: mod_base = OTHER; note = Methylphosphonate linkage
  modified_base 14: mod_base = m5u; note = 5-methyluridine
  misc_feature 1..26: note = RM106956
aacctctgaggantgggttcattttt

SEQ ID NO: 1109 - DNA, 26 bp, synthetic construct
  source 1..26: mol_type = other DNA
  misc_feature 13..14: note = DNA
  misc_feature order(1..12,15..26): note = RNA
  modified_base order(1..2,12,17): mod_base = OTHER; note = 2-Prime-O-Methoxyethyl modified nucleoside
  modified_base 3: mod_base = OTHER; note = 2-Prime-O-Methoxyethyl modified 5-methyl Cytidine
  modified_base 13: mod_base = OTHER; note = DNA nucleotide carrying a 6-amino-5-nitro-3-yl-2(1H)-pyridone nucleobase
  modified_base order(4,8,11,16,18..23): mod_base = OTHER; note = 2-Prime-Fluoro modified nucleoside
  modified_base order(5..7,9..10,15,24..26): mod_base = OTHER; note = 2-Prime-O-Methyl modified nucleoside
  modified_base order(1^2,25^26): mod_base = OTHER; note = (1,3-dimethylimidazolidin-2-ylidene) Phosphoramidate linkage
  modified_base order(4..12,13^14,16..25): mod_base = OTHER; note = Phosphorothioate linkage
  modified_base 14^15: mod_base = OTHER; note = Methylphosphonate linkage
  modified_base 14: mod_base = m5u; note = 5-methyluridine
  misc_feature 1..26: note = RM106957
aacctctgaggantgggttcattttt

SEQ ID NO: 1110 - DNA, 26 bp, synthetic construct
  source 1..26: mol_type = other DNA
  misc_feature 13..14: note = DNA
  misc_feature order(1..12,15..26): note = RNA
  modified_base order(1..2,12,17): mod_base = OTHER; note = 2-Prime-O-Methoxyethyl modified nucleoside
  modified_base 3: mod_base = OTHER; note = 2-Prime-O-Methoxyethyl modified 5-methyl Cytidine
  modified_base 13: mod_base = OTHER; note = DNA nucleotide carrying a 6-amino-5-nitro-3-yl-2(1H)-pyridone nucleobase
  modified_base order(8,10..11,16,18..23): mod_base = OTHER; note = 2-Prime-Fluoro modified nucleoside
  modified_base order(4..7,9,15,24..26): mod_base = OTHER; note = 2-Prime-O-Methyl modified nucleoside
  modified_base order(1^2,25^26): mod_base = OTHER; note = (1,3-dimethylimidazolidin-2-ylidene) Phosphoramidate linkage
  modified_base order(4..12,13^14,16..25): mod_base = OTHER; note = Phosphorothioate linkage
  modified_base 14^15: mod_base = OTHER; note = Methylphosphonate linkage
  modified_base 14: mod_base = m5u; note = 5-methyluridine
  misc_feature 1..26: note = RM106958
aacctctgaggantgggttcattttt

SEQ ID NO: 1111 - DNA, 26 bp, synthetic construct
  source 1..26: mol_type = other DNA
  misc_feature 13..14: note = DNA
  misc_feature order(1..12,15..26): note = RNA
  modified_base order(12,17): mod_base = OTHER; note = 2-Prime-O-Methoxyethyl modified nucleoside
  modified_base 13: mod_base = OTHER; note = DNA nucleotide carrying a 6-amino-5-nitro-3-yl-2(1H)-pyridone nucleobase
  modified_base order(1..4,16,18..23): mod_base = OTHER; note = 2-Prime-Fluoro modified nucleoside
  modified_base order(5..11,15,24..26): mod_base = OTHER; note = 2-Prime-O-Methyl modified nucleoside
  modified_base order(1^2,25^26): mod_base = OTHER; note = (1,3-dimethylimidazolidin-2-ylidene) Phosphoramidate linkage
  modified_base order(2..12,13^14,16..25): mod_base = OTHER; note = Phosphorothioate linkage
  modified_base 14^15: mod_base = OTHER; note = Methylphosphonate linkage
  modified_base 14: mod_base = m5u; note = 5-methyluridine
  misc_feature 1..26: note = RM106959
aacctctgaggantgggttcattttt

SEQ ID NO: 1112 - DNA, 26 bp, synthetic construct
  source 1..26: mol_type = other DNA
  misc_feature 13..14: note = DNA
  misc_feature order(1..12,15..26): note = RNA
  modified_base order(12,17): mod_base = OTHER; note = 2-Prime-O-Methoxyethyl modified nucleoside
  modified_base 13: mod_base = OTHER; note = DNA nucleotide carrying a 6-amino-5-nitro-3-yl-2(1H)-pyridone nucleobase
  modified_base order(1..4,16,18..23): mod_base = OTHER; note = 2-Prime-Fluoro modified nucleoside
  modified_base order(5..11,15,24..26): mod_base = OTHER; note = 2-Prime-O-Methyl modified nucleoside
  modified_base order(1..12,13^14,16..25): mod_base = OTHER; note = Phosphorothioate linkage
  modified_base 14^15: mod_base = OTHER; note = Methylphosphonate linkage
  modified_base 25^26: mod_base = OTHER; note = (1,3-dimethylimidazolidin-2-ylidene) Phosphoramidate linkage
  modified_base 14: mod_base = m5u; note = 5-methyluridine
  misc_feature 1..26: note = RM106960
aacctctgaggantgggttcattttt

SEQ ID NO: 1113 - DNA, 26 bp, synthetic construct
  source 1..26: mol_type = other DNA
  misc_feature 13..14: note = DNA
  misc_feature order(1..12,15..26): note = RNA
  modified_base order(2,12,17): mod_base = OTHER; note = 2-Prime-O-Methoxyethyl modified nucleoside
  modified_base 3: mod_base = OTHER; note = 2-Prime-O-Methoxyethyl modified 5-methyl Cytidine
  modified_base 13: mod_base = OTHER; note = DNA nucleotide carrying a 6-amino-5-nitro-3-yl-2(1H)-pyridone nucleobase
  modified_base order(1,6,8,10,16,19,21,23): mod_base = OTHER; note = 2-Prime-Fluoro modified nucleoside
  modified_base order(4..5,7,9,11,15,18,20,22,24..26): mod_base = OTHER; note = 2-Prime-O-Methyl modified nucleoside
  modified_base order(1^2,25^26): mod_base = OTHER; note = (1,3-dimethylimidazolidin-2-ylidene) Phosphoramidate linkage
  modified_base order(4..12,13^14,16..25): mod_base = OTHER; note = Phosphorothioate linkage
  modified_base 14^15: mod_base = OTHER; note = Methylphosphonate linkage
  modified_base 14: mod_base = m5u; note = 5-methyluridine
  misc_feature 1..26: note = RM106961
aacctctgaggantgggttcattttt

SEQ ID NO: 1114 - DNA, 26 bp, synthetic construct
  source 1..26: mol_type = other DNA
  misc_feature 13..14: note = DNA
  misc_feature order(1..12,15..26): note = RNA
  modified_base order(12,17): mod_base = OTHER; note = 2-Prime-O-Methoxyethyl modified nucleoside
  modified_base 13: mod_base = OTHER; note = DNA nucleotide carrying a 6-amino-5-nitro-3-yl-2(1H)-pyridone nucleobase
  modified_base order(1..4,16,21..23): mod_base = OTHER; note = 2-Prime-Fluoro modified nucleoside
  modified_base order(5..11,15,18..20,24..26): mod_base = OTHER; note = 2-Prime-O-Methyl modified nucleoside
  modified_base order(1^2,25^26): mod_base = OTHER; note = (1,3-dimethylimidazolidin-2-ylidene) Phosphoramidate linkage
  modified_base order(2..12,13^14,16..25): mod_base = OTHER; note = Phosphorothioate linkage
  modified_base 14^15: mod_base = OTHER; note = Methylphosphonate linkage
  modified_base 14: mod_base = m5u; note = 5-methyluridine
  misc_feature 1..26: note = RM106962
aacctctgaggantgggttcattttt

SEQ ID NO: 1115 - DNA, 26 bp, synthetic construct
  source 1..26: mol_type = other DNA
  misc_feature 13..14: note = DNA
  misc_feature order(1..12,15..26): note = RNA
  modified_base order(2,12,17): mod_base = OTHER; note = 2-Prime-O-Methoxyethyl modified nucleoside
  modified_base 3: mod_base = OTHER; note = 2-Prime-O-Methoxyethyl modified 5-methyl Cytidine
  modified_base 13: mod_base = OTHER; note = DNA nucleotide carrying a 6-amino-5-nitro-3-yl-2(1H)-pyridone nucleobase
  modified_base order(1,8,10..11,16,19,21,23): mod_base = OTHER; note = 2-Prime-Fluoro modified nucleoside
  modified_base order(4..7,9,15,18,20,22,24..26): mod_base = OTHER; note = 2-Prime-O-Methyl modified nucleoside
  modified_base order(1^2,25^26): mod_base = OTHER; note = (1,3-dimethylimidazolidin-2-ylidene) Phosphoramidate linkage
  modified_base order(4..12,13^14,16..25): mod_base = OTHER; note = Phosphorothioate linkage
  modified_base 14^15: mod_base = OTHER; note = Methylphosphonate linkage
  modified_base 14: mod_base = m5u; note = 5-methyluridine
  misc_feature 1..26: note = RM106963
aacctctgaggantgggttcattttt

SEQ ID NO: 1116 - DNA, 25 bp, synthetic construct
  source 1..25: mol_type = other DNA
  misc_feature 12..13: note = DNA
  misc_feature order(1..11,14..25): note = RNA
  modified_base order(1,11,16): mod_base = OTHER; note = 2-Prime-O-Methoxyethyl modified nucleoside
  modified_base 2: mod_base = OTHER; note = 2-Prime-O-Methoxyethyl modified 5-methyl Cytidine
  modified_base 12: mod_base = OTHER; note = DNA nucleotide carrying a 6-amino-5-nitro-3-yl-2(1H)-pyridone nucleobase
  modified_base order(5,7,9,15,18,20,22): mod_base = OTHER; note = 2-Prime-Fluoro modified nucleoside
  modified_base order(3..4,6,8,10,14,17,19,21,23..25): mod_base = OTHER; note = 2-Prime-O-Methyl modified nucleoside
  modified_base order(1^2,24^25): mod_base = OTHER; note = (1,3-dimethylimidazolidin-2-ylidene) Phosphoramidate linkage
  modified_base order(3..11,12^13,15..24): mod_base = OTHER; note = Phosphorothioate linkage
  modified_base 13^14: mod_base = OTHER; note = Methylphosphonate linkage
  modified_base 13: mod_base = m5u; note = 5-methyluridine
  misc_feature 1..25: note = RM106964
acctctgaggantgggttcattttt

SEQ ID NO: 1117 - DNA, 24 bp, synthetic construct
  source 1..24: mol_type = other DNA
  misc_feature 11..12: note = DNA
  misc_feature order(1..10,13..24): note = RNA
  modified_base order(10,15): mod_base = OTHER; note = 2-Prime-O-Methoxyethyl modified nucleoside
  modified_base 1..2: mod_base = OTHER; note = 2-Prime-O-Methoxyethyl modified 5-methyl Cytidine
  modified_base 11: mod_base = OTHER; note = DNA nucleotide carrying a 6-amino-5-nitro-3-yl-2(1H)-pyridone nucleobase
  modified_base order(4,6,8,14,17,19,21): mod_base = OTHER; note = 2-Prime-Fluoro modified nucleoside
  modified_base order(3,5,7,9,13,16,18,20,22..24): mod_base = OTHER; note = 2-Prime-O-Methyl modified nucleoside
  modified_base order(1^2,23^24): mod_base = OTHER; note = (1,3-dimethylimidazolidin-2-ylidene) Phosphoramidate linkage
  modified_base order(3..10,11^12,14..23): mod_base = OTHER; note = Phosphorothioate linkage
  modified_base 12^13: mod_base = OTHER; note = Methylphosphonate linkage
  modified_base 12: mod_base = m5u; note = 5-methyluridine
  misc_feature 1..24: note = RM106965
cctctgaggantgggttcattttt

SEQ ID NO: 1118 - DNA, 23 bp, synthetic construct
  source 1..23: mol_type = other DNA
  misc_feature 10..11: note = DNA
  misc_feature order(1..9,12..23): note = RNA
  modified_base order(9,14): mod_base = OTHER; note = 2-Prime-O-Methoxyethyl modified nucleoside
  modified_base 1: mod_base = OTHER; note = 2-Prime-O-Methoxyethyl modified 5-methyl Cytidine
  modified_base 2: mod_base = OTHER; note = 2-Prime-O-Methoxyethyl modified 5-methyl Uridine
  modified_base 10: mod_base = OTHER; note = DNA nucleotide carrying a 6-amino-5-nitro-3-yl-2(1H)-pyridone nucleobase
  modified_base order(3,5,7,13,16,18,20): mod_base = OTHER; note = 2-Prime-Fluoro modified nucleoside
  modified_base order(4,6,8,12,15,17,19,21..23): mod_base = OTHER; note = 2-Prime-O-Methyl modified nucleoside
  modified_base order(1^2,22^23): mod_base = OTHER; note = (1,3-dimethylimidazolidin-2-ylidene) Phosphoramidate linkage
  modified_base order(3..9,10^11,13..22): mod_base = OTHER; note = Phosphorothioate linkage
  modified_base 11^12: mod_base = OTHER; note = Methylphosphonate linkage
  modified_base 11: mod_base = m5u; note = 5-methyluridine
  misc_feature 1..23: note = RM106966
ctctgaggantgggttcattttt

SEQ ID NO: 1119 - DNA, 22 bp, synthetic construct
  source 1..22: mol_type = other DNA
  misc_feature 9..10: note = DNA
  misc_feature order(1..8,11..22): note = RNA
  modified_base order(8,13): mod_base = OTHER; note = 2-Prime-O-Methoxyethyl modified nucleoside
  modified_base 1: mod_base = OTHER; note = 2-Prime-O-Methoxyethyl modified 5-methyl Uridine
  modified_base 9: mod_base = OTHER; note = DNA nucleotide carrying a 6-amino-5-nitro-3-yl-2(1H)-pyridone nucleobase
  modified_base order(2,4,6,12,15,17,19): mod_base = OTHER; note = 2-Prime-Fluoro modified nucleoside
  modified_base order(3,5,7,11,14,16,18,20..22): mod_base = OTHER; note = 2-Prime-O-Methyl modified nucleoside
  modified_base order(1^2,21^22): mod_base = OTHER; note = (1,3-dimethylimidazolidin-2-ylidene) Phosphoramidate linkage
  modified_base order(2..8,9^10,12..21): mod_base = OTHER; note = Phosphorothioate linkage
  modified_base 10^11: mod_base = OTHER; note = Methylphosphonate linkage
  modified_base 10: mod_base = m5u; note = 5-methyluridine
  misc_feature 1..22: note = RM106967
tctgaggantgggttcattttt

SEQ ID NO: 1120 - DNA, 21 bp, synthetic construct
  source 1..21: mol_type = other DNA
  misc_feature 8..9: note = DNA
  misc_feature order(1..7,10..21): note = RNA
  modified_base order(7,12): mod_base = OTHER; note = 2-Prime-O-Methoxyethyl modified nucleoside
  modified_base 8: mod_base = OTHER; note = DNA nucleotide carrying a 6-amino-5-nitro-3-yl-2(1H)-pyridone nucleobase
  modified_base order(1,3,5,11,14,16,18): mod_base = OTHER; note = 2-Prime-Fluoro modified nucleoside
  modified_base order(2,4,6,10,13,15,17,19..21): mod_base = OTHER; note = 2-Prime-O-Methyl modified nucleoside
  modified_base order(1^2,20^21): mod_base = OTHER; note = (1,3-dimethylimidazolidin-2-ylidene) Phosphoramidate linkage
  modified_base order(2..7,8^9,11..20): mod_base = OTHER; note = Phosphorothioate linkage
  modified_base 9^10: mod_base = OTHER; note = Methylphosphonate linkage
  modified_base 9: mod_base = m5u; note = 5-methyluridine
  misc_feature 1..21: note = RM106968
ctgaggantgggttcattttt

SEQ ID NO: 1121 - DNA, 28 bp, synthetic construct
  source 1..28: mol_type = other DNA
  misc_feature 19..20: note = DNA
  misc_feature order(1..18,21..28): note = RNA
  modified_base order(2..3,18,23): mod_base = OTHER; note = 2-Prime-O-Methoxyethyl modified nucleoside
  modified_base order(1,5): mod_base = OTHER; note = 2-Prime-O-Methoxyethyl modified 5-methyl Cytidine
  modified_base 4: mod_base = OTHER; note = 2-Prime-O-Methoxyethyl modified 5-methyl Uridine
  modified_base 19: mod_base = OTHER; note = DNA nucleotide carrying a 6-amino-5-nitro-3-yl-2(1H)-pyridone nucleobase
  modified_base order(12..17,22,24..28): mod_base = OTHER; note = 2-Prime-Fluoro modified nucleoside
  modified_base order(6..11,21): mod_base = OTHER; note = 2-Prime-O-Methyl modified nucleoside
  modified_base order(1^2,27^28): mod_base = OTHER; note = (1,3-dimethylimidazolidin-2-ylidene) Phosphoramidate linkage
  modified_base order(6..18,19^20,22..27): mod_base = OTHER; note = Phosphorothioate linkage
  modified_base 20^21: mod_base = OTHER; note = Methylphosphonate linkage
  modified_base 20: mod_base = m5u; note = 5-methyluridine
  misc_feature 1..28: note = RM106566
cggtcaaacctctgaggantgggttcat

SEQ ID NO: 1122 - DNA, 28 bp, synthetic construct
  source 1..28: mol_type = other DNA
  misc_feature 19..20: note = DNA
  misc_feature order(1..18,21..28): note = RNA
  modified_base order(2..3,18,23): mod_base = OTHER; note = 2-Prime-O-Methoxyethyl modified nucleoside
  modified_base order(1,5): mod_base = OTHER; note = 2-Prime-O-Methoxyethyl modified 5-methyl Cytidine
  modified_base 4: mod_base = OTHER; note = 2-Prime-O-Methoxyethyl modified 5-methyl Uridine
  modified_base 19: mod_base = OTHER; note = DNA nucleotide carrying a 6-amino-5-nitro-3-yl-2(1H)-pyridone nucleobase
  modified_base 22: mod_base = OTHER; note = 2-Prime-Fluoro modified nucleoside
  modified_base order(6..17,21,24..28): mod_base = OTHER; note = 2-Prime-O-Methyl modified nucleoside
  modified_base order(1^2,27^28): mod_base = OTHER; note = (1,3-dimethylimidazolidin-2-ylidene) Phosphoramidate linkage
  modified_base order(6..18,19^20,22..27): mod_base = OTHER; note = Phosphorothioate linkage
  modified_base 20^21: mod_base = OTHER; note = Methylphosphonate linkage
  modified_base 20: mod_base = m5u; note = 5-methyluridine
  misc_feature 1..28: note = RM106969
cggtcaaacctctgaggantgggttcat

SEQ ID NO: 1123 - DNA, 28 bp, synthetic construct
  source 1..28: mol_type = other DNA
  misc_feature 19..20: note = DNA
  misc_feature order(1..18,21..28): note = RNA
  modified_base order(2..3,18,23): mod_base = OTHER; note = 2-Prime-O-Methoxyethyl modified nucleoside
  modified_base order(1,5): mod_base = OTHER; note = 2-Prime-O-Methoxyethyl modified 5-methyl Cytidine
  modified_base 4: mod_base = OTHER; note = 2-Prime-O-Methoxyethyl modified 5-methyl Uridine
  modified_base 19: mod_base = OTHER; note = DNA nucleotide carrying a 6-amino-5-nitro-3-yl-2(1H)-pyridone nucleobase
  modified_base order(12..17,22,25,27): mod_base = OTHER; note = 2-Prime-Fluoro modified nucleoside
  modified_base order(6..11,21,24,26,28): mod_base = OTHER; note = 2-Prime-O-Methyl modified nucleoside
  modified_base order(1^2,27^28): mod_base = OTHER; note = (1,3-dimethylimidazolidin-2-ylidene) Phosphoramidate linkage
  modified_base order(6..18,19^20,22..27): mod_base = OTHER; note = Phosphorothioate linkage
  modified_base 20^21: mod_base = OTHER; note = Methylphosphonate linkage
  modified_base 20: mod_base = m5u; note = 5-methyluridine
  misc_feature 1..28: note = RM106970
cggtcaaacctctgaggantgggttcat

SEQ ID NO: 1124 - DNA, 28 bp, synthetic construct
  source 1..28: mol_type = other DNA
  misc_feature 19..20: note = DNA
  misc_feature order(1..18,21..28): note = RNA
  modified_base order(2..3,18,23): mod_base = OTHER; note = 2-Prime-O-Methoxyethyl modified nucleoside
  modified_base order(1,5): mod_base = OTHER; note = 2-Prime-O-Methoxyethyl modified 5-methyl Cytidine
  modified_base 4: mod_base = OTHER; note = 2-Prime-O-Methoxyethyl modified 5-methyl Uridine
  modified_base 19: mod_base = OTHER; note = DNA nucleotide carrying a 6-amino-5-nitro-3-yl-2(1H)-pyridone nucleobase
  modified_base order(12..17,22,25,27..28): mod_base = OTHER; note = 2-Prime-Fluoro modified nucleoside
  modified_base order(6..11,21,24,26): mod_base = OTHER; note = 2-Prime-O-Methyl modified nucleoside
  modified_base order(1^2,27^28): mod_base = OTHER; note = (1,3-dimethylimidazolidin-2-ylidene) Phosphoramidate linkage
  modified_base order(6..18,19^20,22..27): mod_base = OTHER; note = Phosphorothioate linkage
  modified_base 20^21: mod_base = OTHER; note = Methylphosphonate linkage
  modified_base 20: mod_base = m5u; note = 5-methyluridine
  misc_feature 1..28: note = RM106971
cggtcaaacctctgaggantgggttcat

SEQ ID NO: 1125 - DNA, 28 bp, synthetic construct
  source 1..28: mol_type = other DNA
  misc_feature 19..20: note = DNA
  misc_feature order(1..18,21..28): note = RNA
  modified_base order(2..3,18,23): mod_base = OTHER; note = 2-Prime-O-Methoxyethyl modified nucleoside
  modified_base order(1,5): mod_base = OTHER; note = 2-Prime-O-Methoxyethyl modified 5-methyl Cytidine
  modified_base 4: mod_base = OTHER; note = 2-Prime-O-Methoxyethyl modified 5-methyl Uridine
  modified_base 19: mod_base = OTHER; note = DNA nucleotide carrying a 6-amino-5-nitro-3-yl-2(1H)-pyridone nucleobase
  modified_base order(12..17,22,27..28): mod_base = OTHER; note = 2-Prime-Fluoro modified nucleoside
  modified_base order(6..11,21,24..26): mod_base = OTHER; note = 2-Prime-O-Methyl modified nucleoside
  modified_base order(1^2,27^28): mod_base = OTHER; note = (1,3-dimethylimidazolidin-2-ylidene) Phosphoramidate linkage
  modified_base order(6..18,19^20,22..27): mod_base = OTHER; note = Phosphorothioate linkage
  modified_base 20^21: mod_base = OTHER; note = Methylphosphonate linkage
  modified_base 20: mod_base = m5u; note = 5-methyluridine
  misc_feature 1..28: note = RM106972
cggtcaaacctctgaggantgggttcat

SEQ ID NO: 1126 - DNA, 28 bp, synthetic construct
  source 1..28: mol_type = other DNA
  misc_feature 19..20: note = DNA
  misc_feature order(1..18,21..28): note = RNA
  modified_base order(2..3,18,23): mod_base = OTHER; note = 2-Prime-O-Methoxyethyl modified nucleoside
  modified_base order(1,5): mod_base = OTHER; note = 2-Prime-O-Methoxyethyl modified 5-methyl Cytidine
  modified_base 4: mod_base = OTHER; note = 2-Prime-O-Methoxyethyl modified 5-methyl Uridine
  modified_base 19: mod_base = OTHER; note = DNA nucleotide carrying a 6-amino-5-nitro-3-yl-2(1H)-pyridone nucleobase
  modified_base order(12..17,22,27): mod_base = OTHER; note = 2-Prime-Fluoro modified nucleoside
  modified_base order(6..11,21,24..26,28): mod_base = OTHER; note = 2-Prime-O-Methyl modified nucleoside
  modified_base order(1^2,27^28): mod_base = OTHER; note = (1,3-dimethylimidazolidin-2-ylidene) Phosphoramidate linkage
  modified_base order(6..18,19^20,22..27): mod_base = OTHER; note = Phosphorothioate linkage
  modified_base 20^21: mod_base = OTHER; note = Methylphosphonate linkage
  modified_base 20: mod_base = m5u; note = 5-methyluridine
  misc_feature 1..28: note = RM106973
cggtcaaacctctgaggantgggttcat

SEQ ID NO: 1127 - DNA, 28 bp, synthetic construct
  source 1..28: mol_type = other DNA
  misc_feature 19..20: note = DNA
  misc_feature order(1..18,21..28): note = RNA
  modified_base order(2..3,18,23): mod_base = OTHER; note = 2-Prime-O-Methoxyethyl modified nucleoside
  modified_base order(1,5): mod_base = OTHER; note = 2-Prime-O-Methoxyethyl modified 5-methyl Cytidine
  modified_base 4: mod_base = OTHER; note = 2-Prime-O-Methoxyethyl modified 5-methyl Uridine
  modified_base 19: mod_base = OTHER; note = DNA nucleotide carrying a 6-amino-5-nitro-3-yl-2(1H)-pyridone nucleobase
  modified_base order(6..7,12,14,22,24..28): mod_base = OTHER; note = 2-Prime-Fluoro modified nucleoside
  modified_base order(8..11,13,15..17,21): mod_base = OTHER; note = 2-Prime-O-Methyl modified nucleoside
  modified_base order(1^2,27^28): mod_base = OTHER; note = (1,3-dimethylimidazolidin-2-ylidene) Phosphoramidate linkage
  modified_base order(6..18,19^20,22..27): mod_base = OTHER; note = Phosphorothioate linkage
  modified_base 20^21: mod_base = OTHER; note = Methylphosphonate linkage
  modified_base 20: mod_base = m5u; note = 5-methyluridine
  misc_feature 1..28: note = RM106974
cggtcaaacctctgaggantgggttcat

SEQ ID NO: 1128 - DNA, 28 bp, synthetic construct
  source 1..28: mol_type = other DNA
  misc_feature 19..20: note = DNA
  misc_feature order(1..18,21..28): note = RNA
  modified_base order(2..3,18,23): mod_base = OTHER; note = 2-Prime-O-Methoxyethyl modified nucleoside
  modified_base order(1,5): mod_base = OTHER; note = 2-Prime-O-Methoxyethyl modified 5-methyl Cytidine
  modified_base 4: mod_base = OTHER; note = 2-Prime-O-Methoxyethyl modified 5-methyl Uridine
  modified_base 19: mod_base = OTHER; note = DNA nucleotide carrying a 6-amino-5-nitro-3-yl-2(1H)-pyridone nucleobase
  modified_base order(6..7,12,16,22,24..28): mod_base = OTHER; note = 2-Prime-Fluoro modified nucleoside
  modified_base order(8..11,13..15,17,21): mod_base = OTHER; note = 2-Prime-O-Methyl modified nucleoside
  modified_base order(1^2,27^28): mod_base = OTHER; note = (1,3-dimethylimidazolidin-2-ylidene) Phosphoramidate linkage
  modified_base order(6..18,19^20,22..27): mod_base = OTHER; note = Phosphorothioate linkage
  modified_base 20^21: mod_base = OTHER; note = Methylphosphonate linkage
  modified_base 20: mod_base = m5u; note = 5-methyluridine
  misc_feature 1..28: note = RM106975
cggtcaaacctctgaggantgggttcat

SEQ ID NO: 1129 - DNA, 28 bp, synthetic construct
  source 1..28: mol_type = other DNA
  misc_feature 19..20: note = DNA
  misc_feature order(1..18,21..28): note = RNA
  modified_base order(2..3,18,23): mod_base = OTHER; note = 2-Prime-O-Methoxyethyl modified nucleoside
  modified_base order(1,5): mod_base = OTHER; note = 2-Prime-O-Methoxyethyl modified 5-methyl Cytidine
  modified_base 4: mod_base = OTHER; note = 2-Prime-O-Methoxyethyl modified 5-methyl Uridine
  modified_base 19: mod_base = OTHER; note = DNA nucleotide carrying a 6-amino-5-nitro-3-yl-2(1H)-pyridone nucleobase
  modified_base order(6..7,12,14,16,22,24..28): mod_base = OTHER; note = 2-Prime-Fluoro modified nucleoside
  modified_base order(8..11,13,15,17,21): mod_base = OTHER; note = 2-Prime-O-Methyl modified nucleoside
  modified_base order(1^2,27^28): mod_base = OTHER; note = (1,3-dimethylimidazolidin-2-ylidene) Phosphoramidate linkage
  modified_base order(6..18,19^20,22..27): mod_base = OTHER; note = Phosphorothioate linkage
  modified_base 20^21: mod_base = OTHER; note = Methylphosphonate linkage
  modified_base 20: mod_base = m5u; note = 5-methyluridine
  misc_feature 1..28: note = RM106976
cggtcaaacctctgaggantgggttcat

SEQ ID NO: 1130 - DNA, 28 bp, synthetic construct
  source 1..28: mol_type = other DNA
  misc_feature 19..20: note = DNA
  misc_feature order(1..18,21..28): note = RNA
  modified_base order(2..3,18,23): mod_base = OTHER; note = 2-Prime-O-Methoxyethyl modified nucleoside
  modified_base order(1,5): mod_base = OTHER; note = 2-Prime-O-Methoxyethyl modified 5-methyl Cytidine
  modified_base 4: mod_base = OTHER; note = 2-Prime-O-Methoxyethyl modified 5-methyl Uridine
  modified_base 19: mod_base = OTHER; note = DNA nucleotide carrying a 6-amino-5-nitro-3-yl-2(1H)-pyridone nucleobase
  modified_base order(6..7,10,12,14,16,22,24..28): mod_base = OTHER; note = 2-Prime-Fluoro modified nucleoside
  modified_base order(8..9,11,13,15,17,21): mod_base = OTHER; note = 2-Prime-O-Methyl modified nucleoside
  modified_base order(1^2,27^28): mod_base = OTHER; note = (1,3-dimethylimidazolidin-2-ylidene) Phosphoramidate linkage
  modified_base order(6..18,19^20,22..27): mod_base = OTHER; note = Phosphorothioate linkage
  modified_base 20^21: mod_base = OTHER; note = Methylphosphonate linkage
  modified_base 20: mod_base = m5u; note = 5-methyluridine
  misc_feature 1..28: note = RM106977
cggtcaaacctctgaggantgggttcat

SEQ ID NO: 1131 - DNA, 28 bp, synthetic construct
  source 1..28: mol_type = other DNA
  misc_feature 19..20: note = DNA
  misc_feature order(1..18,21..28): note = RNA
  modified_base order(2..3,18,23): mod_base = OTHER; note = 2-Prime-O-Methoxyethyl modified nucleoside
  modified_base 1: mod_base = OTHER; note = 2-Prime-O-Methoxyethyl modified 5-methyl Cytidine
  modified_base 4: mod_base = OTHER; note = 2-Prime-O-Methoxyethyl modified 5-methyl Uridine
  modified_base 19: mod_base = OTHER; note = DNA nucleotide carrying a 6-amino-5-nitro-3-yl-2(1H)-pyridone nucleobase
  modified_base order(5..7,12,14,22,24..28): mod_base = OTHER; note = 2-Prime-Fluoro modified nucleoside
  modified_base order(8..11,13,15..17,21): mod_base = OTHER; note = 2-Prime-O-Methyl modified nucleoside
  modified_base order(1^2,27^28): mod_base = OTHER; note = (1,3-dimethylimidazolidin-2-ylidene) Phosphoramidate linkage
  modified_base order(5..18,19^20,22..27): mod_base = OTHER; note = Phosphorothioate linkage
  modified_base 20^21: mod_base = OTHER; note = Methylphosphonate linkage
  modified_base 20: mod_base = m5u; note = 5-methyluridine
  misc_feature 1..28: note = RM106978
cggtcaaacctctgaggantgggttcat

SEQ ID NO: 1132 - DNA, 28 bp, synthetic construct
  source 1..28: mol_type = other DNA
  misc_feature 19..20: note = DNA
  misc_feature order(1..18,21..28): note = RNA
  modified_base order(2..3,18,23): mod_base = OTHER; note = 2-Prime-O-Methoxyethyl modified nucleoside
  modified_base 1: mod_base = OTHER; note = 2-Prime-O-Methoxyethyl modified 5-methyl Cytidine
  modified_base 19: mod_base = OTHER; note = DNA nucleotide carrying a 6-amino-5-nitro-3-yl-2(1H)-pyridone nucleobase
  modified_base order(4..7,22,24..28): mod_base = OTHER; note = 2-Prime-Fluoro modified nucleoside
  modified_base order(8..17,21): mod_base = OTHER; note = 2-Prime-O-Methyl modified nucleoside
  modified_base order(1^2,27^28): mod_base = OTHER; note = (1,3-dimethylimidazolidin-2-ylidene) Phosphoramidate linkage
  modified_base order(4..18,19^20,22..27): mod_base = OTHER; note = Phosphorothioate linkage
  modified_base 20^21: mod_base = OTHER; note = Methylphosphonate linkage
  modified_base 20: mod_base = m5u; note = 5-methyluridine
  misc_feature 1..28: note = RM106979
cggtcaaacctctgaggantgggttcat

SEQ ID NO: 1133 - DNA, 28 bp, synthetic construct
  source 1..28: mol_type = other DNA
  misc_feature 19..20: note = DNA
  misc_feature order(1..18,21..28): note = RNA
  modified_base order(2,18,23): mod_base = OTHER; note = 2-Prime-O-Methoxyethyl modified nucleoside
  modified_base 1: mod_base = OTHER; note = 2-Prime-O-Methoxyethyl modified 5-methyl Cytidine
  modified_base 19: mod_base = OTHER; note = DNA nucleotide carrying a 6-amino-5-nitro-3-yl-2(1H)-pyridone nucleobase
  modified_base order(3..7,22,24..28): mod_base = OTHER; note = 2-Prime-Fluoro modified nucleoside
  modified_base order(8..17,21): mod_base = OTHER; note = 2-Prime-O-Methyl modified nucleoside
  modified_base order(1^2,27^28): mod_base = OTHER; note = (1,3-dimethylimidazolidin-2-ylidene) Phosphoramidate linkage
  modified_base order(3..18,19^20,22..27): mod_base = OTHER; note = Phosphorothioate linkage
  modified_base 20^21: mod_base = OTHER; note = Methylphosphonate linkage
  modified_base 20: mod_base = m5u; note = 5-methyluridine
  misc_feature 1..28: note = RM106980
cggtcaaacctctgaggantgggttcat

SEQ ID NO: 1134 - DNA, 28 bp, synthetic construct
  source 1..28: mol_type = other DNA
  misc_feature 19..20: note = DNA
  misc_feature order(1..18,21..28): note = RNA
  modified_base order(2..3,18,23): mod_base = OTHER; note = 2-Prime-O-Methoxyethyl modified nucleoside
  modified_base 1: mod_base = OTHER; note = 2-Prime-O-Methoxyethyl modified 5-methyl Cytidine
  modified_base 4: mod_base = OTHER; note = 2-Prime-O-Methoxyethyl modified 5-methyl Uridine
  modified_base 19: mod_base = OTHER; note = DNA nucleotide carrying a 6-amino-5-nitro-3-yl-2(1H)-pyridone nucleobase
  modified_base order(5..8,22,24..28): mod_base = OTHER; note = 2-Prime-Fluoro modified nucleoside
  modified_base order(9..17,21): mod_base = OTHER; note = 2-Prime-O-Methyl modified nucleoside
  modified_base order(1^2,27^28): mod_base = OTHER; note = (1,3-dimethylimidazolidin-2-ylidene) Phosphoramidate linkage
  modified_base order(5..18,19^20,22..27): mod_base = OTHER; note = Phosphorothioate linkage
  modified_base 20^21: mod_base = OTHER; note = Methylphosphonate linkage
  modified_base 20: mod_base = m5u; note = 5-methyluridine
  misc_feature 1..28: note = RM106981
cggtcaaacctctgaggantgggttcat

SEQ ID NO: 1135 - DNA, 28 bp, synthetic construct
  source 1..28: mol_type = other DNA
  misc_feature 19..20: note = DNA
  misc_feature order(1..18,21..28): note = RNA
  modified_base order(2..3,18,23): mod_base = OTHER; note = 2-Prime-O-Methoxyethyl modified nucleoside
  modified_base 1: mod_base = OTHER; note = 2-Prime-O-Methoxyethyl modified 5-methyl Cytidine
  modified_base 4: mod_base = OTHER; note = 2-Prime-O-Methoxyethyl modified 5-methyl Uridine
  modified_base 19: mod_base = OTHER; note = DNA nucleotide carrying a 6-amino-5-nitro-3-yl-2(1H)-pyridone nucleobase
  modified_base order(5..9,22,24..28): mod_base = OTHER; note = 2-Prime-Fluoro modified nucleoside
  modified_base order(10..17,21): mod_base = OTHER; note = 2-Prime-O-Methyl modified nucleoside
  modified_base order(1^2,27^28): mod_base = OTHER; note = (1,3-dimethylimidazolidin-2-ylidene) Phosphoramidate linkage
  modified_base order(5..18,19^20,22..27): mod_base = OTHER; note = Phosphorothioate linkage
  modified_base 20^21: mod_base = OTHER; note = Methylphosphonate linkage
  modified_base 20: mod_base = m5u; note = 5-methyluridine
  misc_feature 1..28: note = RM106982
cggtcaaacctctgaggantgggttcat

SEQ ID NO: 1136 - DNA, 28 bp, synthetic construct
  source 1..28: mol_type = other DNA
  misc_feature 19..20: note = DNA
  misc_feature order(1..18,21..28): note = RNA
  modified_base order(2..3,18,23): mod_base = OTHER; note = 2-Prime-O-Methoxyethyl modified nucleoside
  modified_base order(1,5): mod_base = OTHER; note = 2-Prime-O-Methoxyethyl modified 5-methyl Cytidine
  modified_base 4: mod_base = OTHER; note = 2-Prime-O-Methoxyethyl modified 5-methyl Uridine
  modified_base 19: mod_base = OTHER; note = DNA nucleotide carrying a 6-amino-5-nitro-3-yl-2(1H)-pyridone nucleobase
  modified_base order(6..7,12,14,16,22,25,27): mod_base = OTHER; note = 2-Prime-Fluoro modified nucleoside
  modified_base order(8..11,13,15,17,21,24,26,28): mod_base = OTHER; note = 2-Prime-O-Methyl modified nucleoside
  modified_base order(1^2,27^28): mod_base = OTHER; note = (1,3-dimethylimidazolidin-2-ylidene) Phosphoramidate linkage
  modified_base order(6..18,19^20,22..27): mod_base = OTHER; note = Phosphorothioate linkage
  modified_base 20^21: mod_base = OTHER; note = Methylphosphonate linkage
  modified_base 20: mod_base = m5u; note = 5-methyluridine
  misc_feature 1..28: note = RM106983
cggtcaaacctctgaggantgggttcat

SEQ ID NO: 1137 - DNA, 28 bp, synthetic construct
  source 1..28: mol_type = other DNA
  misc_feature 19..20: note = DNA
  misc_feature order(1..18,21..28): note = RNA
  modified_base order(2..3,18,23): mod_base = OTHER; note = 2-Prime-O-Methoxyethyl modified nucleoside
  modified_base 1: mod_base = OTHER; note = 2-Prime-O-Methoxyethyl modified 5-methyl Cytidine
  modified_base 4: mod_base = OTHER; note = 2-Prime-O-Methoxyethyl modified 5-methyl Uridine
  modified_base 19: mod_base = OTHER; note = DNA nucleotide carrying a 6-amino-5-nitro-3-yl-2(1H)-pyridone nucleobase
  modified_base order(5..8,22,25,27..28): mod_base = OTHER; note = 2-Prime-Fluoro modified nucleoside
  modified_base order(9..17,21,24,26): mod_base = OTHER; note = 2-Prime-O-Methyl modified nucleoside
  modified_base order(1^2,27^28): mod_base = OTHER; note = (1,3-dimethylimidazolidin-2-ylidene) Phosphoramidate linkage
  modified_base order(5..18,19^20,22..27): mod_base = OTHER; note = Phosphorothioate linkage
  modified_base 20^21: mod_base = OTHER; note = Methylphosphonate linkage
  modified_base 20: mod_base = m5u; note = 5-methyluridine
  misc_feature 1..28: note = RM106984
cggtcaaacctctgaggantgggttcat

SEQ ID NO: 1138 - DNA, 28 bp, synthetic construct
  source 1..28: mol_type = other DNA
  misc_feature 19..20: note = DNA
  misc_feature order(1..18,21..28): note = RNA
  modified_base order(2..3,18,23): mod_base = OTHER; note = 2-Prime-O-Methoxyethyl modified nucleoside
  modified_base 1: mod_base = OTHER; note = 2-Prime-O-Methoxyethyl modified 5-methyl Cytidine
  modified_base 4: mod_base = OTHER; note = 2-Prime-O-Methoxyethyl modified 5-methyl Uridine
  modified_base 19: mod_base = OTHER; note = DNA nucleotide carrying a 6-amino-5-nitro-3-yl-2(1H)-pyridone nucleobase
  modified_base order(5..7,12,14,22,25,27): mod_base = OTHER; note = 2-Prime-Fluoro modified nucleoside
  modified_base order(8..11,13,15..17,21,24,26,28): mod_base = OTHER; note = 2-Prime-O-Methyl modified nucleoside
  modified_base order(1^2,27^28): mod_base = OTHER; note = (1,3-dimethylimidazolidin-2-ylidene) Phosphoramidate linkage
  modified_base order(5..18,19^20,22..27): mod_base = OTHER; note = Phosphorothioate linkage
  modified_base 20^21: mod_base = OTHER; note = Methylphosphonate linkage
  modified_base 20: mod_base = m5u; note = 5-methyluridine
  misc_feature 1..28: note = RM106985
cggtcaaacctctgaggantgggttcat

SEQ ID NO: 1139 - DNA, 22 bp, synthetic construct
  source 1..22: mol_type = other DNA
  misc_feature 11: note = DNA
  misc_feature order(1..10,12..22): note = RNA
  modified_base 11: mod_base = OTHER; note = DNA nucleotide carrying a 6-amino-5-nitro-3-yl-2(1H)-pyridone nucleobase
  modified_base order(1..10,12..22): mod_base = OTHER; note = RNA
cctctgaggantgggttcattt

SEQ ID NO: 1140 - DNA, 24 bp, synthetic construct
  source 1..24: mol_type = other DNA
  misc_feature 11: note = DNA
  misc_feature order(1..10,12..24): note = RNA
  modified_base 11: mod_base = OTHER; note = DNA nucleotide carrying a 6-amino-5-nitro-3-yl-2(1H)-pyridone nucleobase
  modified_base order(1..10,12..24): mod_base = OTHER; note = RNA
cctctgaggantgggttcattttt

SEQ ID NO: 1141 - DNA, 24 bp, synthetic construct
  source 1..24: mol_type = other DNA
  misc_feature 13: note = DNA
  misc_feature order(1..12,14..24): note = RNA
  modified_base 13: mod_base = OTHER; note = DNA nucleotide carrying a 6-amino-5-nitro-3-yl-2(1H)-pyridone nucleobase
  modified_base order(1..12,14..24): mod_base = OTHER; note = RNA
aacctctgaggantgggttcattt

SEQ ID NO: 1142 - DNA, 25 bp, synthetic construct
  source 1..25: mol_type = other DNA
  misc_feature 13: note = DNA
  misc_feature order(1..12,14..25): note = RNA
  modified_base 13: mod_base = OTHER; note = DNA nucleotide carrying a 6-amino-5-nitro-3-yl-2(1H)-pyridone nucleobase
  modified_base order(1..12,14..25): mod_base = OTHER; note = RNA
aacctctgaggantgggttcatttt

SEQ ID NO: 1143 - DNA, 25 bp, synthetic construct
  source 1..25: mol_type = other DNA
  misc_feature 12: note = DNA
  misc_feature order(1..11,13..25): note = RNA
  modified_base 12: mod_base = OTHER; note = DNA nucleotide carrying a 6-amino-5-nitro-3-yl-2(1H)-pyridone nucleobase
  modified_base order(1..11,13..25): mod_base = OTHER; note = RNA
acctctgaggantgggttcattttt

SEQ ID NO: 1144 - DNA, 26 bp, synthetic construct
  source 1..26: mol_type = other DNA
  misc_feature 13: note = DNA
  misc_feature order(1..12,14..26): note = RNA
  modified_base 13: mod_base = OTHER; note = DNA nucleotide carrying a 6-amino-5-nitro-3-yl-2(1H)-pyridone nucleobase
  modified_base order(1..12,14..26): mod_base = OTHER; note = RNA
aacctctgaggantgggttcattttt

SEQ ID NO: 1145 - DNA, 26 bp, synthetic construct
  source 1..26: mol_type = other DNA
  misc_feature 13: note = DNA
  misc_feature order(1..12,14..26): note = RNA
  modified_base 13: mod_base = OTHER; note = DNA nucleotide carrying a 6-amino-5-nitro-3-yl-2(1H)-pyridone nucleobase
  modified_base order(1..12,14..26): mod_base = OTHER; note = RNA
cacctctgaggantgggttcattttt

SEQ ID NO: 1146 - DNA, 27 bp, synthetic construct
  source 1..27: mol_type = other DNA
  misc_feature 14: note = DNA
  misc_feature order(1..13,15..27): note = RNA
  modified_base 14: mod_base = OTHER; note = DNA nucleotide carrying a 6-amino-5-nitro-3-yl-2(1H)-pyridone nucleobase
  modified_base order(1..13,15..27): mod_base = OTHER; note = RNA
gcacctctgaggantgggttcattttt

SEQ ID NO: 1147 - DNA, 28 bp, synthetic construct
  source 1..28: mol_type = other DNA
  misc_feature 15: note = DNA
  misc_feature order(1..14,16..28): note = RNA
  modified_base 15: mod_base = OTHER; note = DNA nucleotide carrying a 6-amino-5-nitro-3-yl-2(1H)-pyridone nucleobase
  modified_base order(1..14,16..28): mod_base = OTHER; note = RNA
caaacctctgaggantgggttcattttt

SEQ ID NO: 1148 - DNA, 28 bp, synthetic construct
  source 1..28: mol_type = other DNA
  misc_feature 19: note = DNA
  misc_feature order(1..18,20..28): note = RNA
  modified_base 19: mod_base = OTHER; note = DNA nucleotide carrying a 6-amino-5-nitro-3-yl-2(1H)-pyridone nucleobase
  modified_base order(1..18,20..28): mod_base = OTHER; note = RNA
cggtcaaacctctgaggantgggttcat

SEQ ID NO: 1149 - DNA, 30 bp, synthetic construct; identical to SEQ ID NO: 23
  source 1..30: mol_type = other DNA
  misc_feature 17: note = DNA
  misc_feature order(1..16,18..30): note = RNA
  modified_base 17: mod_base = OTHER; note = DNA nucleotide carrying a 6-amino-5-nitro-3-yl-2(1H)-pyridone nucleobase
  modified_base order(1..16,18..30): mod_base = OTHER; note = RNA

SEQ ID NO: 1150 - DNA, 30 bp, synthetic construct; identical to SEQ ID NO: 35
  source 1..30: mol_type = other DNA
  misc_feature 19: note = DNA
  misc_feature order(1..18,20..30): note = RNA
  modified_base 19: mod_base = OTHER; note = DNA nucleotide carrying a 6-amino-5-nitro-3-yl-2(1H)-pyridone nucleobase
  modified_base order(1..18,20..30): mod_base = OTHER; note = RNA

SEQ ID NO: 1151 - DNA, 32 bp, synthetic construct; identical to SEQ ID NO: 19
  source 1..32: mol_type = other DNA
  misc_feature 19: note = DNA
  misc_feature order(1..18,20..32): note = RNA
  modified_base 19: mod_base = OTHER; note = DNA nucleotide carrying a 6-amino-5-nitro-3-yl-2(1H)-pyridone nucleobase
  modified_base order(1..18,20..32): mod_base = OTHER; note = RNA

SEQ ID NO: 1152 - DNA, 22 bp, synthetic construct
  source 1..22: mol_type = other DNA
  misc_feature 11: note = DNA
  misc_feature order(1..10,12..22): note = RNA
  modified_base order(1..10,12..22): mod_base = OTHER; note = RNA
cctctgaggactgggttcattt

SEQ ID NO: 1153 - DNA, 24 bp, synthetic construct
  source 1..24: mol_type = other DNA
  misc_feature 11: note = DNA
  misc_feature order(1..10,12..24): note = RNA
  modified_base order(1..10,12..24): mod_base = OTHER; note = RNA
cctctgaggactgggttcattttt

SEQ ID NO: 1154 - DNA, 24 bp, synthetic construct
  source 1..24: mol_type = other DNA
  misc_feature 13: note = DNA
  misc_feature order(1..12,14..24): note = RNA
  modified_base order(1..12,14..24): mod_base = OTHER; note = RNA
aacctctgaggactgggttcattt

SEQ ID NO: 1155 - DNA, 25 bp, synthetic construct
  source 1..25: mol_type = other DNA
  misc_feature 13: note = DNA
  misc_feature order(1..12,14..25): note = RNA
  modified_base order(1..12,14..25): mod_base = OTHER; note = RNA
aacctctgaggactgggttcatttt

SEQ ID NO: 1156 - DNA, 25 bp, synthetic construct
  source 1..25: mol_type = other DNA
  misc_feature 12: note = DNA
  misc_feature order(1..11,13..25): note = RNA
  modified_base order(1..11,13..25): mod_base = OTHER; note = RNA
acctctgaggactgggttcattttt

SEQ ID NO: 1157 - DNA, 26 bp, synthetic construct
  source 1..26: mol_type = other DNA
  misc_feature 13: note = DNA
  misc_feature order(1..12,14..26): note = RNA
  modified_base order(1..12,14..26): mod_base = OTHER; note = RNA
aacctctgaggactgggttcattttt

SEQ ID NO: 1158 - DNA, 26 bp, synthetic construct
  source 1..26: mol_type = other DNA
  misc_feature 13: note = DNA
  misc_feature order(1..12,14..26): note = RNA
  modified_base order(1..12,14..26): mod_base = OTHER; note = RNA
cacctctgaggactgggttcattttt

SEQ ID NO: 1159 - DNA, 27 bp, synthetic construct
  source 1..27: mol_type = other DNA
  misc_feature 14: note = DNA
  misc_feature order(1..13,15..27): note = RNA
  modified_base order(1..13,15..27): mod_base = OTHER; note = RNA
gcacctctgaggactgggttcattttt

SEQ ID NO: 1160 - DNA, 28 bp, synthetic construct
  source 1..28: mol_type = other DNA
  misc_feature 15: note = DNA
  misc_feature order(1..14,16..28): note = RNA
  modified_base order(1..14,16..28): mod_base = OTHER; note = RNA
caaacctctgaggactgggttcattttt

SEQ ID NO: 1161 - DNA, 28 bp, synthetic construct
  source 1..28: mol_type = other DNA
  misc_feature 19: note = DNA
  misc_feature order(1..18,20..28): note = RNA
  modified_base order(1..18,20..28): mod_base = OTHER; note = RNA
cggtcaaacctctgaggactgggttcat

SEQ ID NO: 1162 - DNA, 30 bp, synthetic construct; identical to SEQ ID NO: 8
  source 1..30: mol_type = other DNA
  misc_feature 17: note = DNA
  misc_feature order(1..16,18..30): note = RNA
  modified_base order(1..16,18..30): mod_base = OTHER; note = RNA

SEQ ID NO: 1163 - DNA, 30 bp, synthetic construct; identical to SEQ ID NO: 4
  source 1..30: mol_type = other DNA
  misc_feature 19: note = DNA
  misc_feature order(1..18,20..30): note = RNA
  modified_base order(1..18,20..30): mod_base = OTHER; note = RNA

SEQ ID NO: 1164 - DNA, 32 bp, synthetic construct; identical to SEQ ID NO: 3
  source 1..32: mol_type = other DNA
  misc_feature 19: note = DNA
  misc_feature order(1..18,20..32): note = RNA
  modified_base order(1..18,20..32): mod_base = OTHER; note = RNA

SEQ ID NO: 1165 - DNA, 22 bp, synthetic construct
  source 1..22: mol_type = other DNA
  misc_feature 11: note = DNA
  misc_feature order(1..10,12..22): note = RNA
  modified_base order(1..10,12..22): mod_base = OTHER; note = RNA
cctctgaggattgggttcattt

SEQ ID NO: 1166 - DNA, 24 bp, synthetic construct
  source 1..24: mol_type = other DNA
  misc_feature 11: note = DNA
  misc_feature order(1..10,12..24): note = RNA
  modified_base order(1..10,12..24): mod_base = OTHER; note = RNA
cctctgaggattgggttcattttt

SEQ ID NO: 1167 - DNA, 24 bp, synthetic construct
  source 1..24: mol_type = other DNA
  misc_feature 13: note = DNA
  misc_feature order(1..12,14..24): note = RNA
  modified_base order(1..12,14..24): mod_base = OTHER; note = RNA
aacctctgaggattgggttcattt

SEQ ID NO: 1168 - DNA, 25 bp, synthetic construct
  source 1..25: mol_type = other DNA
  misc_feature 13: note = DNA
  misc_feature order(1..12,14..25): note = RNA
  modified_base order(1..12,14..25): mod_base = OTHER; note = RNA
aacctctgaggattgggttcatttt

SEQ ID NO: 1169 - DNA, 25 bp, synthetic construct
  source 1..25: mol_type = other DNA
  misc_feature 12: note = DNA
  misc_feature order(1..11,13..25): note = RNA
  modified_base order(1..11,13..25): mod_base = OTHER; note = RNA
acctctgaggattgggttcattttt

SEQ ID NO: 1170 - DNA, 26 bp, synthetic construct
  source 1..26: mol_type = other DNA
  misc_feature 13: note = DNA
  misc_feature order(1..12,14..26): note = RNA
  modified_base order(1..12,14..26): mod_base = OTHER; note = RNA
aacctctgaggattgggttcattttt

SEQ ID NO: 1171 - DNA, 26 bp, synthetic construct
  source 1..26: mol_type = other DNA
  misc_feature 13: note = DNA
  misc_feature order(1..12,14..26): note = RNA
  modified_base order(1..12,14..26): mod_base = OTHER; note = RNA
cacctctgaggattgggttcattttt

SEQ ID NO: 1172 - DNA, 27 bp, synthetic construct
  source 1..27: mol_type = other DNA
  misc_feature 14: note = DNA
  misc_feature order(1..13,15..27): note = RNA
  modified_base order(1..13,15..27): mod_base = OTHER; note = RNA
gcacctctgaggattgggttcattttt

SEQ ID NO: 1173 - DNA, 28 bp, synthetic construct
  source 1..28: mol_type = other DNA
  misc_feature 15: note = DNA
  misc_feature order(1..14,16..28): note = RNA
  modified_base order(1..14,16..28): mod_base = OTHER; note = RNA
caaacctctgaggattgggttcattttt

SEQ ID NO: 1174 - DNA, 28 bp, synthetic construct
  source 1..28: mol_type = other DNA
  misc_feature 19: note = DNA
  misc_feature order(1..18,20..28): note = RNA
  modified_base order(1..18,20..28): mod_base = OTHER; note = RNA
cggtcaaacctctgaggattgggttcat

SEQ ID NO: 1175 - DNA, 30 bp, synthetic construct
  source 1..30: mol_type = other DNA
  misc_feature 17: note = DNA
  misc_feature order(1..16,18..30): note = RNA
  modified_base order(1..16,18..30): mod_base = OTHER; note = RNA
gtcaaacctctgaggattgggttcattttt

SEQ ID NO: 1176 - DNA, 30 bp, synthetic construct
  source 1..30: mol_type = other DNA
  misc_feature 19: note = DNA
  misc_feature order(1..18,20..30): note = RNA
  modified_base order(1..18,20..30): mod_base = OTHER; note = RNA
cggtcaaacctctgaggattgggttcattt

SEQ ID NO: 1177 - DNA, 32 bp, synthetic construct
  source 1..32: mol_type = other DNA
  misc_feature 19: note = DNA
  misc_feature order(1..18,20..32): note = RNA
  modified_base order(1..18,20..32): mod_base = OTHER; note = RNA
cggtcaaacctctgaggattgggttcattttt

SEQ ID NO: 1178 - DNA, 22 bp, synthetic construct
  source 1..22: mol_type = other DNA
  misc_feature 11: note = DNA
  misc_feature order(1..10,12..22): note = RNA
  modified_base 11: mod_base = OTHER; note = DNA nucleotide carrying an iso-uracil nucleobase
  modified_base order(1..10,12..22): mod_base = OTHER; note = RNA
cctctgaggantgggttcattt

SEQ ID NO: 1179 - DNA, 24 bp, synthetic construct
  source 1..24: mol_type = other DNA
  misc_feature 11: note = DNA
  misc_feature order(1..10,12..24): note = RNA
  modified_base 11: mod_base = OTHER; note = DNA nucleotide carrying an iso-uracil nucleobase
  modified_base order(1..10,12..24): mod_base = OTHER; note = RNA
cctctgaggantgggttcattttt

SEQ ID NO: 1180 - DNA, 24 bp, synthetic construct
  source 1..24: mol_type = other DNA
  misc_feature 13: note = DNA
  misc_feature order(1..12,14..24): note = RNA
  modified_base 13: mod_base = OTHER; note = DNA nucleotide carrying an iso-uracil nucleobase
  modified_base order(1..12,14..24): mod_base = OTHER; note = RNA
aacctctgaggantgggttcattt

SEQ ID NO: 1181 - DNA, 25 bp, synthetic construct
  source 1..25: mol_type = other DNA
  misc_feature 13: note = DNA
  misc_feature order(1..12,14..25): note = RNA
  modified_base 13: mod_base = OTHER; note = DNA nucleotide carrying an iso-uracil nucleobase
  modified_base order(1..12,14..25): mod_base = OTHER; note = RNA
aacctctgaggantgggttcatttt

SEQ ID NO: 1182 - DNA, 25 bp, synthetic construct
  source 1..25: mol_type = other DNA
  misc_feature 12: note = DNA
  misc_feature order(1..11,13..25): note = RNA
  modified_base 12: mod_base = OTHER; note = DNA nucleotide carrying an iso-uracil nucleobase
  modified_base order(1..11,13..25): mod_base = OTHER; note = RNA
acctctgaggantgggttcattttt

SEQ ID NO: 1183 - DNA, 26 bp, synthetic construct
  source 1..26: mol_type = other DNA
  misc_feature 13: note = DNA
  misc_feature order(1..12,14..26): note = RNA
  modified_base 13: mod_base = OTHER; note = DNA nucleotide carrying an iso-uracil nucleobase
  modified_base order(1..12,14..26): mod_base = OTHER; note = RNA
aacctctgaggantgggttcattttt

SEQ ID NO: 1184 - DNA, 26 bp, synthetic construct
  source 1..26: mol_type = other DNA
  misc_feature 13: note = DNA
  misc_feature order(1..12,14..26): note = RNA
  modified_base 13: mod_base = OTHER; note = DNA nucleotide carrying an iso-uracil nucleobase
  modified_base order(1..12,14..26): mod_base = OTHER; note = RNA
cacctctgaggantgggttcattttt

SEQ ID NO: 1185 - DNA, 27 bp, synthetic construct
  source 1..27: mol_type = other DNA
  misc_feature 14: note = DNA
  misc_feature order(1..13,15..27): note = RNA
  modified_base 14: mod_base = OTHER; note = DNA nucleotide carrying an iso-uracil nucleobase
  modified_base order(1..13,15..27): mod_base = OTHER; note = RNA
gcacctctgaggantgggttcattttt

SEQ ID NO: 1186 - DNA, 28 bp, synthetic construct
  source 1..28: mol_type = other DNA
  misc_feature 15: note = DNA
  misc_feature order(1..14,16..28): note = RNA
  modified_base 15: mod_base = OTHER; note = DNA nucleotide carrying an iso-uracil nucleobase
  modified_base order(1..14,16..28): mod_base = OTHER; note = RNA
caaacctctgaggantgggttcattttt

SEQ ID NO: 1187 - DNA, 28 bp, synthetic construct
  source 1..28: mol_type = other DNA
  misc_feature 19: note = DNA
  misc_feature order(1..18,20..28): note = RNA
  modified_base 19: mod_base = OTHER; note = DNA nucleotide carrying an iso-uracil nucleobase
  modified_base order(1..18,20..28): mod_base = OTHER; note = RNA
cggtcaaacctctgaggantgggttcat

SEQ ID NO: 1188 - DNA, 30 bp, synthetic construct; identical to SEQ ID NO: 23
  source 1..30: mol_type = other DNA
  misc_feature 17: note = DNA
  misc_feature order(1..16,18..30): note = RNA
  modified_base 17: mod_base = OTHER; note = DNA nucleotide carrying an iso-uracil nucleobase
  modified_base order(1..16,18..30): mod_base = OTHER; note = RNA

SEQ ID NO: 1189 - DNA, 30 bp, synthetic construct; identical to SEQ ID NO: 35
  source 1..30: mol_type = other DNA
  misc_feature 19: note = DNA
  misc_feature order(1..18,20..30): note = RNA
  modified_base 19: mod_base = OTHER; note = DNA nucleotide carrying an iso-uracil nucleobase
  modified_base order(1..18,20..30): mod_base = OTHER; note = RNA

SEQ ID NO: 1190 - DNA, 32 bp, synthetic construct; identical to SEQ ID NO: 19
  source 1..32: mol_type = other DNA
  misc_feature 19: note = DNA
  misc_feature order(1..18,20..32): note = RNA
  modified_base 19: mod_base = OTHER; note = DNA nucleotide carrying an iso-uracil nucleobase
  modified_base order(1..18,20..32): mod_base = OTHER; note = RNA
